(19) United States
(12) Patent Application Publication
(10) Pub. No.: US 2026/0217845 A1
(43) Pub. Date: Jul. 30, 2026

(54) ANTI-TNFR2 ANTIGEN-BINDING PROTEINS AND USES THEREOF

(71) Applicant: Odyssey Therapeutics, Inc., Boston, MA (US)

(72) Inventors: Luigi FRANCHI, Boston, MA (US); Anthony W. OPIPARI, Boston, MA (US); Lee Kim SWEE, Frankfurt am Main (DE); Paul-Albert KÖNIG, Frankfurt am Main (DE); Laura PREISS, Frankfurt am Main (DE); Ferdinand HUBER, Frankfurt am Main (DE); Annegrit SEIFRIED, Frankfurt am Main (DE); Julia KNOPF, Frankfurt am Main (DE); Tomasz PRÓCHNICKI, Frankfurt am Main (DE)

(73) Assignee: Odyssey Therapeutics, Inc., Boston, MA (US)

(21) Appl. No.: 19/146,347

(22) PCT Filed: Jan. 8, 2024
(86) PCT No.: PCT/US2024/010660

§ 371 Date: Jul. 8, 2025

Related U.S. Application Data
(60) Provisional application No. 63/437,877, filed on Jan. 9, 2023.
(60) Provisional application No. 63/472,175, filed on Jun. 9, 2023.

(51) Int. Cl. C07K 16/28; A61K 39/00; A61P 19/02; C07K 14/55

(52) U.S. Cl. CPC C07K 16/2878; A61P 19/02; C07K 14/55; A61K 2039/505; C07K 2317/22; C07K 2317/24; C07K 2317/52; C07K 2317/565; C07K 2317/569; C07K 2317/74; C07K 2317/92; C07K 2319/30

(57) ABSTRACT

The present application provides antigen-binding proteins (e.g., antibodies such as single-domain antibodies) that specifically bind tumor necrosis factor receptor 2 (TNFR2). The application also provides fusion proteins and conjugates comprising the antigen-binding proteins, polynucleotides and recombinant vectors encoding the antigen-binding proteins, as well as host cells and methods for preparing the antigen-binding proteins. The application further provides pharmaceutical compositions comprising the antigen-binding proteins and methods for treating a disease or disorder using the antigen-binding proteins.

### CROSS-REFERENCE TO RELATED APPLICATIONS

[0001] This application claims priority to U.S. Provisional Application No. 63/437,877, filed Jan. 9, 2023, and U.S. Provisional Application No. 63/472,175, filed Jun. 9, 2023, the disclosure of both of which is herein incorporated by reference in its entirety.

### SEQUENCE LISTING

[0002] The instant application contains a Sequence Listing which has been submitted electronically in XML format and is hereby incorporated by reference in its entirety. Said XML copy, created on Jan. 5, 2024, is named 260525_000029_SL.xml and is 4,669,862 bytes in size.

### FIELD OF THE INVENTION

[0003] The present application relates to antigen-binding proteins (e.g., antibodies such as single-domain antibodies) that specifically bind tumor necrosis factor receptor 2 (TNFR2), methods for their preparation, and uses thereof.

### BACKGROUND OF THE INVENTION

[0004] Regulatory T cells (Tregs) are a subset of T cells that play a crucial role in peripheral self-tolerance and the prevention of autoimmunity. Due to their potent immunosuppressive function, Tregs can be targeted for the treatment of autoimmunity. Current strategies seeking to increase or modulate Tregs in autoimmune patients are based on the ex vivo expansion of Tregs prior to autologous transfer. However, a major limitation of the current strategies is their inability to stabilize Tregs phenotype to ensure long-lasting immunoregulation.

[0005] Tumor necrosis factor receptor 2 (TNFR2) signaling has been shown to induce proliferation, sustained suppressive function and FOXP3 promoter demethylation in Tregs (Tseng et al., 2019). TNFR2 signaling also induces the expression of EZH2 (Urbano et al., 2018), a histone methyl transferase involved in the repression of the effector transcriptomic program and stabilization of the Treg phenotype (DuPage et al., 2015). Because of its role in Tregs biology and FOXP3 promoter demethylation, TNFR2 signaling can be leveraged to induce a stable immunosuppressive phenotype and enhance their function to the benefit of autoimmune diseases. Accordingly, there is a need in the art to develop therapeutic molecules that can effectively activate TNFR2 signaling.

### SUMMARY OF THE INVENTION

[0006] As mentioned in the background section above, there is an unmet need in the art to develop therapeutic molecules that can effectively activate TNFR2 signaling. This application provides compositions and methods to address this and other related needs.

[0007] In one aspect, the present disclosure provides an antigen-binding protein that specifically binds tumor necrosis factor receptor 2 (TNFR2), comprising a complementarity determining region 3 (CDR3) comprising an amino acid sequence selected from

a).
(SEQ ID NO: 60)
(Y/F)YQ(S/A)LS(T/S)(P/A)N(Y/F)GQ(V/T)F;
b).
(SEQ ID NO: 61)
AADSDL(S/R)TV(V/T)VGPHDY;
c).
(SEQ ID NO: 62)
AKDAG(S/G)WG(T/R)GPFG(Y/F)(E/D)YDY;
d).
(SEQ ID NO: 63)
AA(T/A)PSGKAY(T/S)Y;
e).
(SEQ ID NO: 64)
ATPGPY(T/S/M)YCAPYGSSWSRGYDY;
f).
(SEQ ID NO: 65)
ARV(R/G)G(T/S/A)PY(E/D)Y(N/G)Y;
g).
(SEQ ID NO: 66)
(T/A/V)A(S/A)PTGRAF(T/N/A)Y;
h).
(SEQ ID NO: 42)
AGSAFDF;
i).
(SEQ ID NO: 67)
S(V/M)(V/L)GRDM(M/V)TY;
j).
(SEQ ID NO: 4063)
AVGDFEGELVLKGDY;
k).
(SEQ ID NO: 4517)
AAD(L/V)G(F/V/Y)LY(A/T/V)DYV(P/R)LH(M/T)HHFGS;
l).
(SEQ ID NO: 4771)
A(A/G)(T/A)(P/L)(S/T)GKAY(T/S)Y.

[0008] In some embodiments, the CDR3 comprises an amino acid sequence selected from SEQ ID NOs: 3, 6, 10, 14, 18, 22, 26, 30, 34, 38, 42, 46, 4063, 4067, 4071, 4524, 4530, and 4727-4730.

[0009] In some embodiments, the antigen-binding protein further comprises a CDR1 comprising an amino acid sequence selected from

a).
(SEQ ID NO: 68)
GSI(V/F)(R/S)(T/A)(N/D)(S/G/A);
b).
(SEQ ID NO: 69)
GFT(F/L)DD(I/Y)A;
c).
(SEQ ID NO: 70)
GFTFS(S/R/G)YA;
d).
(SEQ ID NO: 16)
GRTFSDYG;
e).
(SEQ ID NO: 71)
G(L/F)TLDYYA;
f).
(SEQ ID NO: 72)
GF(T/N)FSMYS;
g).
(SEQ ID NO: 73)
GRTF(G/R/S)(N/S)(Y/L)(T/F);
h).
(SEQ ID NO: 40)
GASLSRNA;
i).
(SEQ ID NO: 74)
GS(I/T)FRFPP;
j).
(SEQ ID NO: 4061)
GFTLDDYA;
and
k).
(SEQ ID NO: 4519)
G(F/V)(S/T)LD(D/Y)(H/Y)T.

[0010] In some embodiments, the antigen-binding protein comprises a CDR1 comprising an amino acid sequence selected from SEQ ID NOs: 1, 5, 8, 12, 16, 20, 24, 28, 32, 36, 40, 44, 4061, 4065, 4069, 4520, and 4719-4722.

[0011] In some embodiments, the antigen-binding protein comprises a CDR2 comprising an amino acid sequence selected from

a).
(SEQ ID NO: 75)
IRSDGF(T/I);
b).
(SEQ ID NO: 76)
I(Y/F)SY(S/G)(S/P)NT;
c).
(SEQ ID NO: 77)
I(Y/S)(S/D)DGS(E/D)T;
d).
(SEQ ID NO: 4699)
INWSN(G/A)RT;
e).
(SEQ ID NO: 78)
I(S/N)(V/T)(S/G)DGST;
f).
(SEQ ID NO: 79)
IDT(R/G)GST;
g).
(SEQ ID NO: 80)
IR(W/R/Y)(T/P)G(G/L)(S/I)T;
h).
(SEQ ID NO: 41)
IYDDGET;
i).
(SEQ ID NO: 45)
LTSGGST;
j).
(SEQ ID NO: 4062)
IFSYSSNT;
and
k).
(SEQ ID NO: 4518)
I(N/S)SNDG(S/T)(T/V).

[0012] In some embodiments, the antigen-binding protein comprises a CDR2 comprises an amino acid sequence selected from SEQ ID NOs: 2, 9, 13, 17, 21, 25, 29, 33, 37, 41, 45, 4062, 4066, 4070, 4527, and 4723-4726.

[0013] In some embodiments, the antigen-binding protein comprise
[0014] i) a CDR1 comprising an amino acid sequence of SEQ ID NO: 68, a CDR2 comprising an amino acid sequence of SEQ ID NO: 75, and a CDR3 comprising an amino acid sequence of SEQ ID NO: 60;
[0015] ii) a CDR1 comprising an amino acid sequence of SEQ ID NO: 69, a CDR2 comprising an amino acid sequence of SEQ ID NO: 76, a CDR3 comprising an amino acid sequence of SEQ ID NO: 61;
[0016] iii) a CDR1 comprising an amino acid sequence of SEQ ID NO: 70, a CDR2 comprising an amino acid sequence of SEQ ID NO: 77, a CDR3 comprising an amino acid sequence of SEQ ID NO: 62;
[0017] iv) a CDR1 comprising an amino acid sequence of SEQ ID NO: 16, a CDR2 comprising an amino acid sequence of SEQ ID NO: 4699, a CDR3 comprising an amino acid sequence of SEQ ID NO: 63;
[0018] v) a CDR1 comprising an amino acid sequence of SEQ ID NO: 71, a CDR2 comprising an amino acid sequence of SEQ ID NO: 78, a CDR3 comprising an amino acid sequence of SEQ ID NO: 64;
[0019] vi) a CDR1 comprising an amino acid sequence of SEQ ID NO: 72, a CDR2 comprising an amino acid sequence of SEQ ID NO: 79, a CDR3 comprising an amino acid sequence of SEQ ID NO: 65;
[0020] vii) a CDR1 comprising an amino acid sequence of SEQ ID NO: 73, a CDR2 comprising an amino acid sequence of SEQ ID NO: 80, a CDR3 comprising an amino acid sequence of SEQ ID NO: 66;
[0021] viii) a CDR1 comprising an amino acid sequence of SEQ ID NO: 40, a CDR2 comprising an amino acid sequence of SEQ ID NO: 41, a CDR3 comprising an amino acid sequence of SEQ ID NO: 42; or
[0022] ix) a CDR1 comprising an amino acid sequence of SEQ ID NO: 74, a CDR2 comprising an amino acid sequence of SEQ ID NO: 45, a CDR3 comprising an amino acid sequence of SEQ ID NO: 67;
[0023] x) a CDR1 comprising an amino acid sequence of SEQ ID NO: 4061, a CDR2 comprising an amino acid sequence of SEQ ID NO: 4062, a CDR3 comprising an amino acid sequence of SEQ ID NO: 4063;
[0024] xi). a CDR1 comprising an amino acid sequence of SEQ ID NO: 4519, a CDR2 comprising an amino acid sequence of SEQ ID NO: 4518, a CDR3 comprising an amino acid sequence of SEQ ID NO: 4517; or
[0025] xii). a CDR1 comprising an amino acid sequence of SEQ ID NO: 16, a CDR2 comprising an amino acid sequence of SEQ ID NO: 4699, a CDR3 comprising an amino acid sequence of SEQ ID NO: 4771.

[0026] In some embodiments, the antigen-binding protein comprise
[0027] a) a CDR1 comprising an amino acid sequence of SEQ ID NO: 69, a CDR2 comprising an amino acid sequence of SEQ ID NO: 76, a CDR3 comprising an amino acid sequence of SEQ ID NO: 61;
[0028] b) a CDR1 comprising an amino acid sequence of SEQ ID NO: 16, a CDR2 comprising an amino acid sequence of SEQ ID NO: 4699, a CDR3 comprising an amino acid sequence of SEQ ID NO: 63;
[0029] c) a CDR1 comprising an amino acid sequence of SEQ ID NO: 73, a CDR2 comprising an amino acid sequence of SEQ ID NO: 80, a CDR3 comprising an amino acid sequence of SEQ ID NO: 66; or
[0030] d) a CDR1 comprising an amino acid sequence of SEQ ID NO: 16, a CDR2 comprising an amino acid sequence of SEQ ID NO: 4699, a CDR3 comprising an amino acid sequence of SEQ ID NO: 4771.

[0031] In some embodiments, the antigen-binding protein comprise comprises
[0032] i) a CDR1 with an amino acid sequence of GSI(V/F)(R/S)(A/T)(N/D)(G/A) (SEQ ID NO: 4700), a CDR2 comprising an amino acid sequence of IRSDGFT (SEQ ID NO: 2), and a CDR3 comprising an amino acid sequence of YYQ(S/A)LSSPNYGQ(V/T)F (SEQ ID NO: 4701);
[0033] ii) a CDR1 with an amino acid sequence of GFTFDDIA (SEQ ID NO: 8), a CDR2 comprising an amino acid sequence of IYSYGPNT (SEQ ID NO: 9), and a CDR3 comprising an amino acid sequence of AADSDLSTW(V/T)GPHDY (SEQ ID NO: 4702);
[0034] iii) a CDR1 with an amino acid sequence of GFTFSRYA (SEQ ID NO: 12), a CDR2 comprising an amino acid sequence of ISDDGSDT (SEQ ID NO: 13), and a CDR3 comprising an amino acid sequence of AKDAGSWGTGPFGYEYDY (SEQ ID NO: 14);
[0035] iv) a CDR1 with an amino acid sequence of GRTFSDYG (SEQ ID NO: 16), a CDR2 comprising an amino acid sequence of INWSN(G/A)RT (SEQ ID NO: 4699), and a CDR3 comprising an amino acid sequence of AA(T/A)PSGKAYSY (SEQ ID NO: 4703);
[0036] v) a CDR1 with an amino acid sequence of GLTLDYYA (SEQ ID NO: 20), a CDR2 comprising an amino acid sequence of ISTSDGST (SEQ ID NO: 21), and a CDR3 comprising an amino acid sequence of ATPGPYTYCAPYGSSWSRGYDY (SEQ ID NO: 22);
[0037] vi) a CDR1 with an amino acid sequence of GF(T/N)FSMYS (SEQ ID NO: 72), a CDR2 comprising an amino acid sequence of IDT(R/G)GST (SEQ ID NO: 79), and a CDR3 comprising an amino acid sequence of ARV(G/R)G(T/A)PYEY(N/G)Y (SEQ ID NO: 4704);
[0038] vii) a CDR1 with an amino acid sequence of GRTF(G/S)S(Y/L)(T/F) (SEQ ID NO: 4705), a CDR2 comprising an amino acid sequence of IR(W/R/Y)(T/P)G(G/L)(S/I)T (SEQ ID NO: 80), and a CDR3 comprising an amino acid sequence of (A/V)A(A/S)PTGRAF(T/N)Y (SEQ ID NO: 4707);
[0039] viii) a CDR1 with an amino acid sequence of GASLSRNA (SEQ ID NO: 40), a CDR2 comprising an amino acid sequence of IYDDGET (SEQ ID NO: 41), and a CDR3 comprising an amino acid sequence of AGSAFDF (SEQ ID NO: 42);
[0040] ix) a CDR1 with an amino acid sequence of GS(T/I)FRFPP (SEQ ID NO: 4708), a CDR2 comprising an amino acid sequence of LTSGGST (SEQ ID NO: 45), and a CDR3 comprising an amino acid sequence of SVLGRDM(M/V)TY (SEQ ID NO: 4706);
[0041] x) a CDR1 with an amino acid sequence of GFTLDDYA (SEQ ID NO: 4061), a CDR2 comprising an amino acid sequence of IFSYSSNT (SEQ ID NO: 4062), and a CDR3 comprising an amino acid sequence of AVGDFEGELVLKGDY (SEQ ID NO: 4063);
[0042] xi) a CDR1 with an amino acid sequence of GFTLDYYT (SEQ ID NO: 4065), a CDR2 comprising an amino acid sequence of ISSNDGSV (SEQ ID NO: 4066), and a CDR3 comprising an amino acid sequence of AADLGYLYVDYVRLHTHHFGS (SEQ ID NO: 4067); or
[0043] xii). a CDR1 with an amino acid sequence of GRTFSDYG (SEQ ID NO: 16), a CDR2 comprising an amino acid sequence of INWSN(G/A)RT (SEQ ID NO: 4699), and a CDR3 comprising an amino acid sequence of A(A/G)(T/A)(P/L)(S/T)GKAY(T/S)Y (SEQ ID NO: 4771).

[0044] In some embodiments, the antigen-binding protein comprises
[0045] a) a CDR1 with an amino acid sequence of GFTFDDIA (SEQ ID NO: 8), a CDR2 comprising an amino acid sequence of IYSYGPNT (SEQ ID NO: 9), and a CDR3 comprising an amino acid sequence of AADSDLSTW(V/T)GPHDY (SEQ ID NO: 4702);
[0046] b) a CDR1 with an amino acid sequence of GRTFSDYG (SEQ ID NO: 16), a CDR2 comprising an amino acid sequence of INWSN(G/A)RT (SEQ ID NO: 4699), and a CDR3 comprising an amino acid sequence of AA(T/A)PSGKAYSY (SEQ ID NO: 4703);
[0047] c) a CDR1 with an amino acid sequence of GRTF(G/S)S(Y/L)(T/F) (SEQ ID NO: 4705), a CDR2 comprising an amino acid sequence of IR(W/R/Y)(T/P)G(G/L)(S/I)T (SEQ ID NO: 80), and a CDR3 comprising an amino acid sequence of (A/V)A(A/S)PTGRAF(T/N)Y (SEQ ID NO: 4707); or
[0048] d). a CDR1 with an amino acid sequence of GRTFSDYG (SEQ ID NO: 16), a CDR2 comprising an amino acid sequence of INWSN(G/A)RT (SEQ ID NO: 4699), and a CDR3 comprising an amino acid sequence of A(A/G)(T/A)(P/L)(S/T)GKAY(T/S)Y (SEQ ID NO: 4771).

[0049] In some embodiments, the antigen-binding protein comprises
[0050] i) a CDR1 comprising an amino acid sequence of SEQ ID NO: 1, a CDR2 comprising an amino acid sequence of SEQ ID NO: 2, and a CDR3 comprising an amino acid sequence of SEQ ID NO: 3;
[0051] ii) a CDR1 comprising an amino acid sequence of SEQ ID NO: 5, a CDR2 comprising an amino acid sequence of SEQ ID NO: 2, a CDR3 comprising an amino acid sequence of SEQ ID NO: 6;
[0052] iii) a CDR1 comprising an amino acid sequence of SEQ ID NO: 8, a CDR2 comprising an amino acid sequence of SEQ ID NO: 9, a CDR3 comprising an amino acid sequence of SEQ ID NO: 10;
[0053] iv) a CDR1 comprising an amino acid sequence of SEQ ID NO: 12, a CDR2 comprising an amino acid sequence of SEQ ID NO: 13, a CDR3 comprising an amino acid sequence of SEQ ID NO: 14;
[0054] v) a CDR1 comprising an amino acid sequence of SEQ ID NO: 16, a CDR2 comprising an amino acid sequence of SEQ ID NO: 17, a CDR3 comprising an amino acid sequence of SEQ ID NO: 18;
[0055] vi) a CDR1 comprising an amino acid sequence of SEQ ID NO: 20, a CDR2 comprising an amino acid sequence of SEQ ID NO: 21, a CDR3 comprising an amino acid sequence of SEQ ID NO: 22;
[0056] vii) a CDR1 comprising an amino acid sequence of SEQ ID NO: 24, a CDR2 comprising an amino acid sequence of SEQ ID NO: 25, a CDR3 comprising an amino acid sequence of SEQ ID NO: 26;
[0057] viii) a CDR1 comprising an amino acid sequence of SEQ ID NO: 28, a CDR2 comprising an amino acid sequence of SEQ ID NO: 29, a CDR3 comprising an amino acid sequence of SEQ ID NO: 30;
[0058] ix) a CDR1 comprising an amino acid sequence of SEQ ID NO: 32, a CDR2 comprising an amino acid sequence of SEQ ID NO: 33, a CDR3 comprising an amino acid sequence of SEQ ID NO: 34;
[0059] x) a CDR1 comprising an amino acid sequence of SEQ ID NO: 36, a CDR2 comprising an amino acid sequence of SEQ ID NO: 37, a CDR3 comprising an amino acid sequence of SEQ ID NO: 38;
[0060] xi) a CDR1 comprising an amino acid sequence of SEQ ID NO: 40, a CDR2 comprising an amino acid sequence of SEQ ID NO: 41, a CDR3 comprising an amino acid sequence of SEQ ID NO: 42;
[0061] xii) a CDR1 comprising an amino acid sequence of SEQ ID NO: 44, a CDR2 comprising an amino acid sequence of SEQ ID NO: 45, a CDR3 comprising an amino acid sequence of SEQ ID NO: 46;
[0062] xiii) a CDR1 comprising an amino acid sequence of SEQ ID NO: 4061, a CDR2 comprising an amino acid sequence of SEQ ID NO: 4062, a CDR3 comprising an amino acid sequence of SEQ ID NO: 4063;
[0063] xiv). a CDR1 comprising an amino acid sequence of SEQ ID NO: 4065, a CDR2 comprising an amino acid sequence of SEQ ID NO: 4066, a CDR3 comprising an amino acid sequence of SEQ ID NO: 4067;
[0064] xv). a CDR1 comprising an amino acid sequence of SEQ ID NO: 4069, a CDR2 comprising an amino acid sequence of SEQ ID NO: 4070, a CDR3 comprising an amino acid sequence of SEQ ID NO: 4071;
[0065] xvi). a CDR1 comprising an amino acid sequence of SEQ ID NO: 4520, a CDR2 comprising an amino acid sequence of SEQ ID NO: 45, a CDR3 comprising an amino acid sequence of SEQ ID NO: 46;
[0066] xvii). a CDR1 comprising an amino acid sequence of SEQ ID NO: 8, a CDR2 comprising an amino acid sequence of SEQ ID NO: 9, a CDR3 comprising an amino acid sequence of SEQ ID NO: 4524;
[0067] xviii). a CDR1 comprising an amino acid sequence of SEQ ID NO: 16, a CDR2 comprising an amino acid sequence of SEQ ID NO: 4527, a CDR3 comprising an amino acid sequence of SEQ ID NO: 18;
[0068] xix). a CDR1 comprising an amino acid sequence of SEQ ID NO: 16, a CDR2 comprising an amino acid sequence of SEQ ID NO: 4527, a CDR3 comprising an amino acid sequence of SEQ ID NO: 4530;
[0069] xx). a CDR1 comprising an amino acid sequence of SEQ ID NO: 4719, a CDR2 comprising an amino acid sequence of SEQ ID NO: 4723, a CDR3 comprising an amino acid sequence of SEQ ID NO: 4727;
[0070] xxl). a CDR1 comprising an amino acid sequence of SEQ ID NO: 4720, a CDR2 comprising an amino acid sequence of SEQ ID NO: 4724, a CDR3 comprising an amino acid sequence of SEQ ID NO: 4728;
[0071] xxii). a CDR1 comprising an amino acid sequence of SEQ ID NO: 4721, a CDR2 comprising an amino acid sequence of SEQ ID NO: 4725, a CDR3 comprising an amino acid sequence of SEQ ID NO: 4729; or
[0072] xxiii). a CDR1 comprising an amino acid sequence of SEQ ID NO: 4722, a CDR2 comprising an amino acid sequence of SEQ ID NO: 4726, a CDR3 comprising an amino acid sequence of SEQ ID NO: 4730.

[0073] In some embodiments, the antigen-binding protein comprises
[0074] a) a CDR1 comprising an amino acid sequence of SEQ ID NO: 16, a CDR2 comprising an amino acid sequence of SEQ ID NO: 17, a CDR3 comprising an amino acid sequence of SEQ ID NO: 18;
[0075] b). a CDR1 comprising an amino acid sequence of SEQ ID NO: 16, a CDR2 comprising an amino acid sequence of SEQ ID NO: 4527, a CDR3 comprising an amino acid sequence of SEQ ID NO: 18;
[0076] c). a CDR1 comprising an amino acid sequence of SEQ ID NO: 16, a CDR2 comprising an amino acid sequence of SEQ ID NO: 4527, a CDR3 comprising an amino acid sequence of SEQ ID NO: 4530;
[0077] d) a CDR1 comprising an amino acid sequence of SEQ ID NO: 8, a CDR2 comprising an amino acid sequence of SEQ ID NO: 9, a CDR3 comprising an amino acid sequence of SEQ ID NO: 10;
[0078] e). a CDR1 comprising an amino acid sequence of SEQ ID NO: 8, a CDR2 comprising an amino acid sequence of SEQ ID NO: 9, a CDR3 comprising an amino acid sequence of SEQ ID NO: 4524;
[0079] f). a CDR1 comprising an amino acid sequence of SEQ ID NO: 4069, a CDR2 comprising an amino acid sequence of SEQ ID NO: 4070, a CDR3 comprising an amino acid sequence of SEQ ID NO: 4071;
[0080] g). a CDR1 comprising an amino acid sequence of SEQ ID NO: 4719, a CDR2 comprising an amino acid sequence of SEQ ID NO: 4723, a CDR3 comprising an amino acid sequence of SEQ ID NO: 4727;
[0081] h). a CDR1 comprising an amino acid sequence of SEQ ID NO: 4720, a CDR2 comprising an amino acid sequence of SEQ ID NO: 4724, a CDR3 comprising an amino acid sequence of SEQ ID NO: 4728;
[0082] i). a CDR1 comprising an amino acid sequence of SEQ ID NO: 4721, a CDR2 comprising an amino acid sequence of SEQ ID NO: 4725, a CDR3 comprising an amino acid sequence of SEQ ID NO: 4729; or
[0083] j). a CDR1 comprising an amino acid sequence of SEQ ID NO: 4722, a CDR2 comprising an amino acid sequence of SEQ ID NO: 4726, a CDR3 comprising an amino acid sequence of SEQ ID NO: 4730.

[0084] In some embodiments, the antigen-binding protein is a single-domain antibody. In some embodiments, the single-domain antibody is a VHH, a VNAR, or an engineered VH domain.

[0085] In some embodiments, the VHH is a camelid VHH. In some embodiments, the VHH comprises an amino acid sequence selected from any one of SEQ ID NOs: 4, 7, 11, 15, 19, 23, 27, 31, 35, 39, 43, 47, 4064, 4068, 4072, 4521, 93-640, 4079-4125 2805-3363, 4359-4420, and 4605-4628, or a sequence having at least 75% identity thereto. In some embodiments, the VHH comprises an amino acid sequence selected from any one of SEQ ID NOs: 4, 7, 11, 15, 19, 23, 27, 31, 35, 39, 43, 47, 4064, 4068, 4072, and 4521 or a sequence having at least 75% identity thereto.

[0086] In some embodiments, the VHH is a humanized VHH. In some embodiments, the humanized VHH comprises an amino acid sequence selected from any one of SEQ ID NOs: 81-92, 4076-, 4078, 4523, 4526, 4529, 4532, 4731-4734, 641-1127, and 4126-4172, or a sequence having at least 75% Identity thereto. In some embodiments, the humanized VHH comprises an amino acid sequence selected from any one of SEQ ID NOs: 81-92, 4076-4078, 4523, 4526, 4529, 4731-4734, and 4532, or a sequence having at least 75% identity thereto.

[0087] In some embodiments, the antigen-binding protein has an agonist effect upon binding to TNFR2,

[0088] In some embodiments, the antigen-binding protein binds to human TNFR2. In some embodiments, the antigen-binding protein binds to human TNFR2 with a K_{D} of less than about 3×10⁻⁷ M. In some embodiments, the antigen-binding protein binds to human TNFR2 with a K_{D} of about 1×10⁻¹⁰ to 5×10⁻⁸ M.

[0089] In some embodiments, the antigen-binding protein binds to cyno TNFR2. In some embodiments, the antigen-binding protein binds to cyno TNFR2 with a K_{D} of less than about 3×10⁻⁷ M. In some embodiments, the antigen-binding protein binds to cyno TNFR2 with a K_{D} of about 1×10⁻³ to 2×10⁻⁷ M.

[0090] In some embodiments, the antigen-binding protein binds to the same epitope(s) as antibody clone MR2-1. In some embodiments, the antigen-binding protein does not bind to the same epitope(s) as antibody clone MR2-1.

[0091] In some embodiments, the antigen-binding protein increases expression of one or more proteins selected from a protein in the NF-kB pathway, FOXP3, HELIOS, EZH2, HLA-DR, ICAM-1, OX-40, ICOS, and CCR8.

[0092] In some embodiments, the antigen-binding protein comprises one or more modifications that reduce binding of said antigen-binding protein by pre-existing antibodies found in human blood or serum.

[0093] In another aspect, provided herein is a fusion protein that specifically binds tumor necrosis factor receptor 2 (TNFR2), comprising one or more of the antigen-binding proteins described herein.

[0094] In some embodiments, the fusion protein comprises two of the antigen-binding proteins described herein. In some embodiments, the fusion protein comprises three of the antigen-binding proteins described herein. In some embodiments, the fusion protein comprises four of the antigen-binding proteins described herein. In some embodiments, the fusion protein comprises five of the antigen-binding proteins described herein. In some embodiments, the fusion protein comprises six of the antigen-binding proteins described herein.

[0095] In some embodiments of the fusion protein described herein, the one or more antigen-binding proteins may bind to the same epitope on TNFR2. In other embodiments, the one or more antigen-binding proteins may bind to different epitopes on TNFR2.

[0096] In some embodiments of the fusion protein described herein, the one or more antigen-binding proteins are one or more single-domain antibodies. In some embodiments, the one or more single-domain antibodies are one or more VHHs.

[0097] In some embodiments of the fusion protein described herein, the fusion protein further comprises an immunoglobulin Fc region. In some embodiments, the immunoglobulin Fc region is an Fc region of a human immunoglobulin. In some embodiments, the immunoglobulin Fc region is an Fc region of human IgG1, IgG2, IgG3 or IgG4, or a variant thereof.

[0098] In some embodiments, the immunoglobulin Fc region is an Fc region of human IgG1, or a variant thereof. In some embodiments, the Fc region of human IgG1 comprises one or more mutations selected from L234A, L235A, G237A, D265A, N297A, and/or P329A according to EU numbering. In some embodiments, the Fc region of human IgG1 comprises a set of mutations selected from
[0099] 1). L234A and L235A;
[0100] 2). L234A, L235A, and P329A;
[0101] 3). D265A, N297A and P329A; and
[0102] 4). L234A, L235A, and G237A.

[0103] In some embodiments, the immunoglobulin Fc region is an Fc region of human IgG1 comprising L234A, L235A, and P329A.

[0104] In some embodiments, the immunoglobulin Fc region is an Fc region of human IgG4, or a variant thereof. In some embodiments, the Fc region of human IgG4 comprises one or more mutations selected from S228P, L235E, L235A, and/or F234A according to EU numbering. In some embodiments, the Fc region of human IgG4 comprises a set of mutations selected from
[0105] 1). S228P and L235E;
[0106] 2). S228P and L235A;
[0107] 3). S228P, F234A, and L235E; and
[0108] 4). S228P, F234A, and L235A.

[0109] In some embodiments, the immunoglobulin Fc region is an Fc region of human IgG4 comprising S228P and L235E.

[0110] In some embodiments of the fusion protein described herein, the fusion protein further comprises a cytokine. In some embodiments, the cytokine is IL-2, or a variant thereof. In one embodiment, the cytokine is an IL-2 variant comprising a N88D mutation.

[0111] In some embodiments of the fusion protein described herein, the fusion protein further comprises a moiety that binds to serum albumin.

[0112] In some embodiments of the fusion protein described herein, the fusion protein comprises an amino acid sequence of any one of SEQ ID Nos: 3933-3964, 4483-4513, 4686-4696, 4709-4716, and 4735-4770, or a sequence having at least 75% identity thereto.

[0113] In some embodiments of the fusion protein described herein, the fusion protein comprises an amino acid sequence of SEQ ID No: 4483, or a sequence having at least 75% identity thereto.

[0114] In some embodiments of the fusion protein described herein, the fusion protein comprises an amino acid sequence of SEQ ID No: 4489, or a sequence having at least 75% identity thereto.

[0115] In another aspect, provided herein is a conjugate comprising the antigen-binding protein described herein or the fusion protein described herein, wherein the antigen-binding protein or fusion protein is conjugated to a second moiety. In some embodiments, the second moiety is selected from a detectable label, a drug, a toxin, a radionuclide, an enzyme, an immunomodulatory agent, a cytokine, a cytotoxic agent, a chemotherapeutic agent, a diagnostic agent, or a combination thereof.

[0116] In some embodiments of the conjugate described herein, wherein the second moiety is a cytokine. In some embodiments, the cytokine is IL-2, or a variant thereof. In one embodiment, the cytokine is IL-2 variant comprising a N88D mutation.

[0117] In another aspect, provided herein is a polynucleotide molecule encoding the antigen-binding protein described herein or the fusion protein described herein. In some embodiments, the polynucleotide molecule comprises the nucleotide sequence of any one of SEQ ID NOs: 48-59, 4073-4075, 4522, 4525, 4528, 4531, 3364-3922, 4421-4482, and 4629-4652, or a sequence having at least 70% identity thereto. In some embodiments, the polynucleotide molecule comprises the nucleotide sequence of any one of SEQ ID NOs: 48-59, 4073-4075, 4522, 4525, 4528, and 4531, or a sequence having at least 70% identity thereto.

[0118] In another aspect, provided herein is a recombinant vector comprising the polynucleotide molecule described herein.

[0119] In another aspect, provided herein is a host cell comprising polynucleotide molecule described herein, or the expression vector described herein.

[0120] In another aspect, provided herein is a kit comprising the antigen-binding protein, the fusion protein, the conjugate, the polynucleotide molecule, or the recombinant vector described herein, and optionally, instructions and/or packaging for the same.

[0121] In another aspect, provided herein is a pharmaceutical composition comprising the antigen-binding protein, the fusion protein, the conjugate, the polynucleotide molecule, or the recombinant vector described herein, and a pharmaceutically acceptable carrier and/or excipient.

[0122] In another aspect, provided herein is a method for preparing an antigen-binding protein or a fusion protein that specifically binds tumor necrosis factor receptor 2 (TNFR2), comprising the steps of:
[0123] (a) culturing the host cell described herein in a culture medium under conditions suitable for expression of the antigen-binding protein or fusion protein, and
[0124] (b) isolating the antigen-binding protein or fusion protein from the host cell and/or culture medium,

[0125] In another aspect, provided herein is a method for promoting proliferation, activating and/or enhancing suppressive function, and/or stabilizing immunosuppressive phenotype of a population of regulatory T cells (Treg) comprising contacting the population of regulatory T cells with the antigen-binding protein, the fusion protein, or the conjugate described herein. In some embodiments, said contacting occurs in vitro. In some embodiments, said contacting occurs in vivo. In some embodiments wherein the method occurs in vivo, the method further comprises administering the antigen-binding protein, the fusion protein, or the conjugate into a subject in need thereof.

[0126] In another aspect, provided herein is a method of treating or preventing a disease or disorder in a subject in need thereof, said method comprising administering to the subject the antigen-binding protein, the fusion protein, or the conjugate described herein. In some embodiments, the disease or disorder is an Immunological disease, inflammatory disease, cancer, cardiovascular disease, or an infertility and pregnancy-associated disease.

[0127] In some embodiments, the immunological disease is selected from an autoimmune disease, a neurological condition, an allergy, asthma, macular degeneration, muscular atrophy, a disease related to miscarriage, atherosclerosis, bone loss, a musculoskeletal disease, obesity, a graft-versus-host disease, and an allograft rejection.

[0128] In some embodiments, the autoimmune disease is selected from lupus, alopecia areata, ankylosing spondylitis, antiphospholipid syndrome, autoimmune Addison's disease, autoimmune hemolytic anemia, autoimmune hepatitis, Behcet's disease, bullous pemphigoid, cardiomyopathy, celiac sprue-dermatitis, chronic fatigue immune dysfunction syndrome (CFIDS), chronic inflammatory demyelinating polyneuropathy, Churg-Strauss syndrome, cicatricial pemphigoid, CREST syndrome, cold agglutinin disease, Crohn's disease, essential mixed cryoglobulinemia, fibromyalgia-fibromyositis, Goodpastures disease, Graves' disease, Guillain-Barré, Hashimoto's thyroiditis, hypothyroidism, idiopathic pulmonary fibrosis, idiopathic thrombocytopenia purpura (ITP), IgA nephropathy, juvenile arthritis, lichen planus, lichen sclerosis, IgG4-related disease, Meniere's disease, mixed connective tissue disease, multiple sclerosis, myasthenia gravis, neuromyelitis optica spectrum disease, pemphigus vulgaris, or related blistering skin disease, pernicious anemia, polyarteritis nodosa, polychondritis, polyglandular syndromes, polymyalgia rheumatica, polymyositis and dermatomyositis, premature ovarian failure, primary agammaglobulinemia, primary biliary cirrhosis, psoriasis, primary ovarian insufficiency, Raynaud's phenomenon, Reiter's syndrome, rheumatic fever, rheumatoid arthritis, sarcoidosis, scleroderma, Sjögren's syndrome, spondyloarthritis, stiff-man syndrome, type I diabetes, Takayasu arteritis, temporal arteritis/giant cell arteritis, ulcerative colitis, uveitis, vasculitis, vitiligo, and Wegener's granulomatosis (Granulomatosis with polyangiitis) or other immune vasculitis.

[0129] In some embodiments, the lupus is systemic lupus erythematosus (SLE), cutaneous lupus, lupus nephritis, neonatal lupus, or drug-induced lupus. In some embodiments, the cutaneous lupus is acute cutaneous lupus, chronic cutaneous lupus erythematosus, discoid lupus erythematosus (DLE), or subacute cutaneous lupus erythematosus.

[0130] In some embodiments, the autoimmune disease is atopic dermatitis, psoriasis, systemic lupus erythematosus, or arthritis.

[0131] In some embodiments, the neurological condition is selected from a brain tumor, a brain metastasis, a spinal cord injury, schizophrenia, epilepsy, Amyotrophic lateral sclerosis (ALS), Alzheimer's disease, Huntington's disease, Parkinson's disease, and stroke.

[0132] In some embodiments, the allergy is selected from food allergy, seasonal allergy, pet allergy, hives, hay fever, allergic conjunctivitis, poison ivy allergy oak allergy, mold allergy, drug allergy, dust allergy, cosmetic allergy, and chemical allergy.

[0133] In some embodiments, the allograft rejection is selected from skin graft rejection, bone graft rejection, vascular tissue graft rejection, ligament graft rejection, and organ graft rejection.

[0134] In some embodiments, the ligament graft rejection is selected from cricothyroid ligament graft rejection, caudal cruciate ligament graft rejection, periodontal ligament graft rejection, suspensory ligament of the lens graft rejection, palmar radiocarpal ligament graft rejection, dorsal radiocarpal ligament graft rejection, ulnar collateral ligament graft rejection, radial collateral ligament graft rejection, suspensory ligament of the breast graft rejection, anterior sacroiliac ligament graft rejection, posterior sacroiliac ligament graft rejection, sacrotuberous ligament graft rejection, sacrospinous ligament graft rejection, inferior pubic ligament graft rejection, superior pubic ligament graft rejection, anterior cruciate ligament graft rejection, lateral collateral ligament graft rejection, posterior cruciate ligament graft rejection, medial collateral ligament graft rejection, cranial cruciate ligament graft rejection, and patellar ligament graft rejection.

[0135] In some embodiments, the organ graft rejection is selected from heart graft rejection, lung graft rejection, kidney graft rejection, liver graft rejection, pancreas graft rejection, intestine graft rejection, and thymus graft rejection.

[0136] In some embodiments, the graft-versus-host disease arises from a bone marrow transplant or one or more blood cells selected from B-cells, T-cells, basophils, common myeloid progenitor cells, common lymphoid progenitor cells, dendritic cells, eosinophils, hematopoietic stem cells, neutrophils, natural killer cells, megakaryocytes, monocytes, or macrophages.

[0137] In some embodiments, the inflammatory disease is acute or chronic inflammation.

[0138] In some embodiments, the inflammatory disease is selected from osteoarthritis, atopic dermatitis, endometriosis, polycystic ovarian syndrome, inflammatory bowel disease, fibrotic lung disease, and cardiac inflammation.

[0139] In some embodiments, the cancer is selected from adenoid cystic carcinoma, adrenal gland tumor, amyloidosis, anal cancer, appendix cancer, astrocytoma, ataxia-telangiectasia, Beckwith-Wiedemann syndrome, bile duct cancer (cholangiocarcinoma), Birt-Hogg-Dubé syndrome, bladder cancer, bone cancer (sarcoma of bone), brain stem glioma, brain tumor, breast cancer, inflammatory breast cancer, metastatic breast cancer, male breast cancer, Carney complex, central nervous system tumors (brain and spinal cord), cervical cancer, childhood cancer, colorectal cancer, Cowden syndrome, craniopharyngioma, desmoid tumor, desmoplastic infantile ganglioglioma, childhood tumor, ependymoma, esophageal cancer, Ewing sarcoma, eye cancer, eyelid cancer, familial adenomatous polyposis, familial GIST, familial malignant melanoma, familial pancreatic cancer, gallbladder cancer, gastrointestinal stromal tumor (GIST), germ cell tumor, gestational trophoblastic disease, head and neck cancer, hereditary breast and ovarian cancer, hereditary diffuse gastric cancer, hereditary leiomyomatosis and renal cell cancer, hereditary mixed polyposis syndrome, hereditary pancreatitis, hereditary papillary renal carcinoma, HIV/AIDS-related cancer, juvenile polyposis syndrome, kidney cancer, lacrimal gland tumor, laryngeal and hypopharyngeal cancer, acute lymphoblastic leukemia (ALL), acute myeloid leukemia (AML), B-cell prolymphocytic leukemia and hairy cell leukemia, chronic lymphocytic leukemia (CLL), chronic myeloid leukemia (CML), chronic T-cell lymphocytic leukemia, eosinophilic leukemia, Li-Fraumeni syndrome, liver cancer, lung cancer, non-small cell lung cancer, small cell lung cancer, hodgkin lymphoma, non-hodgkin lymphoma, lynch syndrome, mastocytosis, medulloblastoma, melanoma, meningioma, mesothelioma, multiple endocrine neoplasia type 1, multiple endocrine neoplasia type 2, multiple myeloma, MUTYH (or MYH)-associated polyposis, myelodysplastic syndromes (MDS), nasal cavity and paranasal sinus cancer, nasopharyngeal cancer, neuroblastoma, neuroendocrine tumor of the gastrointestinal tract, neuroendocrine tumor of the lung, neuroendocrine tumor of the pancreas, neuroendocrine tumors, neurofibromatosis type 1, neurofibromatosis type 2, nevoid basal cell carcinoma syndrome, oral and oropharyngeal cancer, osteosarcoma, ovarian, fallopian tube, and peritoneal cancer, pancreatic cancer, parathyroid cancer, penile cancer, Peutz-Jeghers syndrome, pheochromocytoma and paraganglioma, pituitary gland tumor, pleuropulmonary blastoma, prostate cancer, retinoblastoma, rhabdomyosarcoma, salivary gland cancer, Kaposi sarcoma, soft tissue sarcomas, skin cancer (non-melanoma), small bowel cancer, stomach cancer, testicular cancer, thymoma and thymic carcinoma, thyroid cancer, tuberous sclerosis complex, uterine cancer, vaginal cancer, Von Hippel-Lindau syndrome, vulvar cancer, Waldenstrom macroglobulinemia (lymphoplasmacytic lymphoma), Werner syndrome, Wilms tumor, or xeroderma pigmentosum.

[0140] In some embodiments, the cardiovascular disease is selected from atherosclerosis, heart failure, left heart failure with reduced ejection fraction, left heart failure with preserved ejection fraction, right ventricular failure, congestive heart failure, restrictive cardiomyopathy, dilated cardiomyopathy, hypertrophic cardiomyopathy, ischemic cardiomyopathy, idiopathic cardiomyopathy, and hypertension.

[0141] In some embodiments, the infertility and pregnancy-associated diseases is selected from recurrent pregnancy loss, pre-eclampsia, preterm labor, fetal growth restriction, or intrauterine growth restriction.

[0142] In another aspect, provided herein is a method of regenerating a tissue or organ comprising one or more TNFR2+ cells, said method comprising contacting the tissue or organ with an effective amount of the antigen-binding protein, the fusion protein, or the conjugate described herein. In some embodiments, the tissue or organ is selected from pancreas, salivary gland, pituitary gland, kidney, heart, lung, hematopoietic system, cranial nerves, heart, aorta, olfactory gland, ear, nerve, eye, thymus, tongue, bone, liver, small intestine, large intestine, gastrointestinal, lung, brain, skin, peripheral nervous system, central nervous system, spinal cord, breast, embryonic structures, embryo, and testes tissue. In some embodiments, said contacting occurs in vitro. In some embodiments, said contacting occurs in vivo. In some embodiments wherein the method occurs in vivo, the method further comprises administering the antigen-binding protein, the fusion protein, or the conjugate into a subject in need thereof.

[0143] In various embodiments of the above-described methods, the subject is a mammal. In some embodiments, the mammal is human.

[0144] In another aspect, provided herein is a method for inducing tolerance to a foreign agent and/or preventing or reducing immune response to a foreign agent in a subject in need thereof, comprising an administering to the subject the antigen-binding protein, the fusion protein, or the conjugate described herein.

[0145] In some embodiments, the foreign agent is a therapeutic protein, a peptide, a vector, a biochemical vector, a lipid, a carbohydrate, a nucleic acid, a sperm, an oocyte, or an embryo. In some embodiments, the vector is a viral vector, a bacterial vector, or a fungal vector. In some embodiments, the viral vector is a DNA or RNA vector.

### BRIEF DESCRIPTION OF DRAWINGS

[0146] FIG. 1 depicts an exemplary general panning strategy for isolation of tumor necrosis factor (TNF) receptor type 2 (TNFR2)-specific variable domain of heavy chain (VHH) antibodies, also referred to herein as V-bodies (Vbs). Binders to human and rodent TNFR2 were enriched from VHH immune libraries by two rounds of phage display. BM, bone marrow.

[0147] FIG. 2 shows VHH immune library selection for next-generation sequencing (NGS) across the phage display process. Three initial libraries, 12 samples of the first panning round, and 36 samples of the second panning round, were sequenced with 20 million, 2 million, and 2 million reads, respectively. Comparison of V-body enrichment from the initial library to the first and second round of panning enabled identification of potential V-body candidates.

[0148] FIG. 3 shows a schematic diagram of an exemplary NGS workflow. Following phage display, the VHH region of the phage eluate was amplified via polymerase chain reaction (PCR). Unique and sample-specific barcodes were then fused, and NGS was subsequently performed using the Illumina NovaSeq platform (Genewiz). The raw data were de-multiplexed, and then processed by the NGS analysis pipeline. Forward and reverse sequence pairs were merged via overlapping regions and the VHHs, Including complementarity determining regions (CDRs) were annotated. Based on CDR3 identity, V-body sequences were clustered, thereby allowing for detailed analysis of, e.g., V-body enrichment during phage display, sequence diversity, CDR3 length distribution, and cluster abundance. Based on such analyses, more than 600 candidates were selected for DNA synthesis (Twist) and further characterization.

[0149] FIGS. 4A-4B illustrate human TNFR2 (hTNFR2) V-body binding validation at a fixed concentration of 1 μM V-body. The bar histogram (FIG. 4A) and table (FIG. 4B) show the percentage of Alexa488-positive cells for all VHHs tested. For the bar histogram, the black dotted line indicates background staining (~5%), and the gray dotted line indicates two times the background level. A V-body having a signal-to-noise ratio greater than 2 is considered as a “binder”. Gray shading within the table indicates binders to hTNFR2. Italicized text within the table indicates different cell passage(s) and date(s) of experiment.

[0150] FIGS. 5A-5B illustrate human TNFR2 (hTNFR2) V-body binding validation at a fixed concentration of 100 nM V-body. The bar histogram (FIG. 5A) and table (FIG. 5B) show the percentage of Alexa488-positive cells for all VHHs tested. For the bar histogram, the black dotted line indicates background staining (~5%), and the gray dotted line indicates two times the background level. A V-body having a signal-to-noise ratio greater than 2 is considered as a “binder”. Gray shading within the table indicates binders to hTNFR2.

[0151] FIGS. 6A-6C depict cross-specificity of V-body binding to mouse TNFR2 (mTNFR2) (FIG. 6A) and cynomolgus TNFR2 (CTNFR2) (FIG. 6B) at a fixed concentration of 100 nM. The bar histograms (FIGS. 6A-6B) and table (FIG. 6C) show the percentage of Alexa488-positive cells for all VHHs tested. For the bar histogram, the black dotted line indicates background staining, and the gray dotted line indicates two times the background level.

[0152] FIG. 7 shows testing of human TNFR2 V-body binding across a range of concentrations for V-bodies ODY-31D6, ODY-35A10, ODY-31G3, ODY-31G11, ODY-33D4, ODY-37C7, and V-bodies. V-bodies were tested at molar concentrations of 100 nM, 50 nM, 12.5 nM, 6.25 nM, 3.12 nM, and 1.55 nM.

[0153] FIG. 8 shows a schematic diagram of an exemplary experimental setup for determination of binding affinities of the V-bodies for their respective target via surface plasmon resonance (SPR) (left panel) and a corresponding table describing the V-body candidates analyzed (right panel). Figure discloses SEQ ID NO: 4717.

[0154] FIGS. 9A-9F depict surface plasmon resonance (SPR) sensorograms of VHH binding to human, cynomolgus, and mouse TNFR2. Fitted binding curves and calculated dissociation constants (K_{D}) are included.

[0155] FIG. 10 shows a summary of binding affinities of 16 selected anti-TNFR2 V-bodies to human, cynomolgus and mouse TNFR2. Cyno, cynomolgus.

[0156] FIG. 11 demonstrates that some humanized anti-TNFR2 V-bodies targeted the epitope recognized by a MR2-1 bivalent agonist. N1365hu1 and N1409hu1 may recognize the same epitope as MR2-1. MR2-1 binding enhanced binding of N1402hu1, N1425hu1 and N1277hu1 to TNFR2.

[0157] FIGS. 12A-12E show TNFR2 agonism by multivalent V-body fusion constructs. Agonism of bivalent (FIG. 12A), tetravalent (FIGS. 12B-12C), and IL-2 N88D fusion (FIG. 12D) anti-TNFR2 constructs were characterized on NF-κB reporter HEK293 cells stably expressing TNFR2. Dot plots show a dose-dependent response of anti-TNFR2 VHHs compared to a control VHH (Ctrl). FIG. 12E shows that activity of WIL_33D4_2×VHH-Fc, and an IL-2 mutein, was demonstrated in reporter cell lines specific for each signaling pathway. RLU, relative luminescence unit.

[0158] FIG. 13 depicts HEK293 TNFR2 NF-κB (Luc) reporter gene assay controls. Anti-hTNFR2 agonist MR2-1 monoclonal antibodies were tested on NF-κB reporter (Luc) HEK293 reporter cell-line stably expressing TNFR2 (clone 25) versus parental cell line (PCL), RLU, relative luminescence unit,

[0159] FIGS. 14A-14C shows HEK293 TNFR2 NF-κB (Luc) reporter gene assay samples and assay controls. A description of reporter gene assay samples and assay controls is shown in FIG. 14A. A bar graph showing protein concentration (mg/mL) for the V-body constructs and respective controls is depicted in FIG. 14B. A bar graph showing RLUs for V-body constructs and respective controls tested on a PCL control is depicted in FIG. 14C.

[0160] FIGS. 15A-15B depict concentration range curve data generated using MR2-1 (FIG. 15A) and TNFα (FIG. 15B) controls for four assay plates.

[0161] FIGS. 16A-16C show exemplary dot plots of RLUs measured across increasing concentrations (mol/L) of control (control 12) and tetravalent V-body fusion constructs comprising four V-bodies mounted onto the fragment crystallizable (Fc) region of a IgG4 variant comprising S228P, L235E and P329G mutations.

[0162] FIGS. 17A-17F show exemplary dot plots of RLUs measured across increasing concentrations (mol/L) of control (control 10) and an alternative design of tetravalent V-body fusion constructs comprising four V-bodies mounted onto the Fc region of a IgG4 variant comprising S228P, L235E and P329G mutations.

[0163] FIGS. 18A-18C show exemplary dot plots of RLUs measured across increasing concentrations (mol/L) of control (control 2) and bivalent V-body fusion constructs. Limit of detection, LOD.

[0164] FIGS. 19A-19C show exemplary dot plots of RLUs measured across increasing concentrations (mol/L) of control (control 13) and IL-2 N88D V-body fusion constructs. Limit of detection, LOD.

[0165] FIG. 20 depicts a comparison of RLUs measured across increasing concentrations (mol/L) of monospecific construct 10 (tetravalent Fc) and construct 12 (Vb-Fc-Vb) tested on NF-κB reporter (Luc) HEK293 reporter cell-line stably expressing TNFR2 (clone 8).

[0166] FIG. 21 depicts an exemplary experimental timeline of TNFR2 stimulation by multivalent V-body fusion constructs (e.g., tetravalent Fc, Vb-Fc-Vb, rigid bivalent no Fc) on primary human peripheral blood mononuclear cells (PBMCs) and cluster of differentiation 4 positive (CD4⁺) CD25⁺ CD127dim regulatory T cells (Tregs).

[0167] FIG. 22 shows a bar graph of an overview of in-assay concentrations (nM) of multivalent V-body fusion constructs first wave binders. Concentrations (nM) of the VHH constructs is also shown.

[0168] FIG. 23 illustrates an exemplary gating strategy applied for Treg markers. Treg Donor 1 is shown as an example and an identical strategy was used for Treg Donor 1 and Donor 3. Live cell and CD4 gating were based on Fluorescence Minus One (FMO) FMO control determination of the cut-off point between background fluorescence and positive cell populations. Forkhead box P3 (FoxP3), Human Leukocyte Antigen, DR isotype (HLA-DR), chemokine motif (C-C motif) receptor 8 (CCR8), and OX-40 gating was based on the CD4 subset of IgG control-stained sample from the same donor. For FoxP3, the gate was set at approximately 0.2%. For OX-40, HLA-DR and CCR8, the gate was set at approximately 2%.

[0169] FIGS. 24A-24B demonstrate multivalent anti-TNFR2 V-body fusion constructs increased expression of the Treg suppression marker HLA-DR and CCR8. Histograms displaying expression of Treg suppression marker HLA-DR for specific 37C7 binders compared to control formats (FIG. 24A). Density plots displaying expression of Treg suppression marker HLA-DR and CCR8 for specific 37C7 binders compared to control formats (FIG. 24B). Fluorescein isothiocyanate, FITC; Phycoerythrin, PE.

[0170] FIGS. 25A-25B demonstrates tetravalent anti-TNFR2 V-body fusion constructs strongly increased expression of Treg suppression marker HLA-DR on FoxP3⁺ Tregs. The bar graphs show HLA-DR mean fluorescent intensity (MFI) measured for each of the tetravalent Fc, Vb-Fc-Vb, and rigid bivalent no Fc V-body fusion formats relative to control formats.

[0171] FIG. 26 shows dose-response curves based on HLA-DR MFI values of CD4⁺ FoxP3⁺ Tregs for construct 37C7 and control 10 for Donor 2.

[0172] FIG. 27 shows dose-dependent induction of Treg suppression marker HLA-DR expression across various concentrations of tetravalent anti-TNFR2 V-body Fc fusion construct 10 for Donor 1 (top panel) and Donor 2 (bottom panel).

[0173] FIG. 28 shows dose-dependent induction of Treg suppression marker HLA-DR expression across various concentrations of rigid bivalent anti-TNFR2 V-body fusion construct 2 for Donor 1 (top panel) and Donor 2 (bottom panel).

[0174] FIG. 29 shows dose-dependent induction of Treg suppression marker HLA-DR expression across various concentrations of tetravalent anti-TNFR2 V-body Vb-Fc-Vb fusion construct 12 for Donor 1 (top panel) and Donor 2 (bottom panel).

[0175] FIG. 30 shows exemplary design of multivalent anti-TNFR2 V-body fusion constructs, Anti-TNFR2 V-bodies are shown as ovals, linkers are shown with flexible (e.g., GS linkers) as curved lines, rigid linkers (e.g., proline linker) as straight lines, and Fc domains as dimeric bars. Figure discloses SEQ ID NO: 4718.

[0176] FIG. 31 shows assessment of tetravalent-Fc VHH activity on naïve CD4+CD25+CD45RA+ human Treg. HLA-DR and CCR8 expression on CD4+FOXP3+ and expansion after 5 day stimulation with anti-CD3/IL-2 plus VHH or MR2-1 are shown.

[0177] FIG. 32A shows the ability of TNFR2 VHH to stabilize Treg. Naive CD4+CD25+CD45RA+ human Treg from healthy donors were stimulated with IL-2 and anti-CD3 in the presence of TNFR2 agonist VHH or TNFR2 monoclonal agonist MR2-1 for 5 days.

[0178] FIG. 32B shows the effect of TNFR2 VHH on early markers of Treg stability. Naive CD4+CD25+CD45RA+ human Treg from healthy donors were stimulated with IL-2 and anti-CD3 in the presence of TNFR2 agonist VHH or IL-2 mutein for 5 days.

[0179] FIGS. 33A-33B show additional results of in vitro treatment of human Treg (CD4+ FOXP3+) with VHH WIL_33D4_2×VHH-Fc or IL-2 mutein in the presence of anti-CD3 and IL-2. WIL 33D4_2×VHH-Fc induced and expanded a Treg population with high levels of FOXP3, EZH2 (a marker of stability), CCR8, and HLA-DR (biomarkers of tissue homing and Treg immunosuppressive functionality). T-test: *p<0.05; **p<0.01; n=3.

[0180] FIGS. 34A-34C show the effect of TNFR2 VHH on Treg stability under inflammatory conditions. Human Treg were expanded with IL-2 mutein or TNFR2 VHH in the presence of anti-CD3 and IL-2 for 5 days and then cultured with proinflammatory cytokines (IL-1b, IL-21, and IL-23+/−TGFb) for 11 to 12 days; IL-17A or IFNγ production after PMA/ionomycin stimulation was assessed together with FOXP3 by flow cytometry. The conversion of human Treg in vitro to cells that produce Th1/17 cytokines (IFNγ/IL-17A) triggered by the inflammatory cytokines shown was prevented by co-stimulation with TNFR2 VHH but not with IL-2 mutein. P-values indicate results of a paired T-test; *=p<0.05; **=p<0.01; Fc=human IgG4 mutant Fc.

[0181] FIG. 35 shows assessment of Treg function upon TNFR2 agonism. Naive Treg were stimulated for 7 days with anti-CD3/IL-2 plus TNFR2 VHH (WIL_33D4_2×VHH-Fc), control VHH, MR2-1, control IgG, or IL-2 mutein; after 7 days, stimuli were removed and cells were incubated with cell tracer-labeled autologous responder cells (naïve CD4+ T cells); bar graph shows effector CD4 cell proliferation measured as % dividing CD4+FOXP3-cells; FACS histograms show dilution of the cell tracer at different Treg:CD4 (responder) ratios of one of four donors. WIL_33D4_2×VHH-Fc induces Treg that are better able to restrain effector CD4 cell proliferation than IL-2 mutein.

[0182] FIG. 36 shows the effect of TNFR2 agonist VHH on Treg population size in mice. An exemplary design of the experimental procedure is shown. CD4+FOXP3+ Treg expansion in the spleen of mice 5 days after a single injection of 2.5 mg/kg control VHH or TNFR2-specific VHH WIL_33D4_2×VHH-Fc is shown.

[0183] FIG. 37 shows that TNFR2 agonist VHH activates Treg in vivo. CCR8 is a chemokine receptor expressed on highly suppressive Treg and involved in cell migration (Whiteside et al., Immunol 2021; 163:512). ICAM-1 surface adhesion molecule is required for Treg function (Gottrand et al., Immunol 2015; 146 (4): 657). ICOS costimulatory molecule is upregulated upon Treg activation and maintains FOXP3 expression (Landuyt et al., J Immunol 2019; 202 (4): 1039). Proportion of Treg (CD4+CD25+ FOXP3+) in spleen expressing activation markers (CCR8, ICAM-1, or ICOS) 5 days after a single injection of control VHH or TNFR2-specific VHH WIL_33D4_2×VHH-Fc is shown. 1-way ANOVA was performed for control VHH vs. WIL_33D4_2×VHH-Fc; only significant differences are shown; ****=p<0.0001.

[0184] FIG. 38 shows that TNFR2 agonist VHH selectively expands Treg in the spleen. Cell subsets as percentage of CD45+ cells in the spleen 5 days after single injection of TNFR2-specific VHH WIL_33D4_2×VHH-Fc or control VHH are shown.

[0185] FIG. 39 shows that TNFR2 agonist VHH increases serum level of IL-10. IL-10 is a key anti-inflammatory cytokine (Saraiva et al., J Exp Med 2020; 217 (1):e20190418). Serum cytokine concentration 5 days after single injection of TNFR2-specific VHH WIL_33D4_2×VHH-Fc or control VHH is shown. 1-way ANOVA performed for control VHH vs. WIL_33D4_2×VHH-Fc; only significant differences are shown; ****=p<0.0001.

[0186] FIG. 40A-40B show frequency of Treg (CD4+ FOXP3+) among total immune cells (CD45+) in the spleen, blood, colon, and lung in human TNFR2 knock-in mice 5 days after single injection of ODY-520. T-test: ***p<0.001; ****p<0.0001; n=4.

[0187] FIGS. 41A-41E show ODY-520 selectively increases the Treg population in the spleen 5 days after a single administration compared to IL-2 N88D, a mutein that is active in mice. WIL_33D4_2×VHH-Fc is more selective for Treg and induces a higher level of FOXP3 and surface markers (FOXP3, ICAM-1, OX-40, ICOS, and CCR8), consistent with superior function and stability. One-way ANOVA test: ****p<0.0001; n=4.

[0188] FIGS. 42A-42B show that Treg expansion in the spleen as well as increased expression of FOXP3, linked to Treg stability and function, and Treg activation shown by up-regulation of ICAM-1 and ICOS.

[0189] FIGS. 43A-43C show that reduction of arthritis, measured by paw volume and arthritis score, in a model of collagen-antibody induced arthritis upon treatment with TNFR2 agonists ODY-520 and ODY-781.

[0190] FIGS. 44A-44B show Treg expansion by TNFR2 agonist without inducing proinflammatory cytokines when compared to CD28 agonist.

### DETAILED DESCRIPTION OF THE INVENTION

[0191] Regulatory T cells (Treg) are a population of lymphocytes with immunosuppressive function. Activation and expansion of Treg is an attractive therapeutic approach for autoimmune diseases currently being evaluated clinically. In addition to inducing Treg activation and expansion, an effective Treg-directed therapy needs to generate cells with a stable immunosuppressive phenotype that is resistant to conversion to T effector function under inflammatory conditions. Nevertheless, current clinical approaches to stimulate Treg to treat autoimmunity expand Treg by increasing homeostatic proliferation (e.g., via IL-2 muteins) without improving Treg stability. Clinical trials testing IL-2-based approaches to treat autoimmune disease by enhancing Treg function have demonstrated safety and the ability to expand Treg across diseases; however, Treg specificity, Treg stability, and therapeutic efficacy are not optimal (PNAS 2010; 107 (45): 19402; clinicaltrials.gov/study/NCT03943550; clinicaltrials.gov/study/NCT04433585). Optimal Treg therapy needs to (1) expand Treg population size with cells that (2) migrate to tissues where disease occurs and (3) exert immunosuppressive effects, while (4) resisting conversion to inflammatory Th1/17 cells. Therefore, improved therapeutic approaches to promote and stabilize Treg immunosuppressive activity are needed.

[0192] TNFR2 agonism is an alternative approach to enhance Treg function that is projected to address all objectives required for an optimal therapy, including the generation of stable Treg cells that resist conversion to Th1/17 (Front Immunol 2022; 13:888274; Sci Rep 2023; 13 (1): 13762; PNAS 2019; 116 (43): 21666; J Immunol 2013; 190:1076; Arthritis Rheumatol 2020; 72 (4): 576). In one aspect, the present invention provides as described herein, TNFR2 agonists to enhance Treg immunosuppressive activity using a single-domain antibody (e.g., VHH) platform.

### Definitions

[0193] Unless defined otherwise, all technical and scientific terms used herein have the same meaning as commonly understood by one of ordinary skill in the art to which this disclosure belongs. For purposes of interpreting this specification, the following description of terms will apply and whenever appropriate, terms used in the singular will also include the plural and vice versa. All patents, applications, published applications and other publications are incorporated by reference in their entirety. In the event that any description of terms set forth conflicts with any document incorporated herein by reference, the description of term set forth below shall control.

[0194] As used herein, the term “about,” when used in reference to a particular recited numerical value, means that the value may vary from the recited value by no more than 5%. For example, as used herein, the expression “about 100” includes 95 and 105 and all values in between (e.g., 96, 97, 98, 99, etc.).

[0195] The term “antigen” encompasses any agent (e.g., protein, peptide, polysaccharide, glycoprotein, glycolipid, nucleotide, portions thereof, or combinations thereof) that may be specifically bound by the products of specific humoral or cellular immunity, such as an antibody molecule or T-cell receptor. In various embodiments of the present disclosure, the antigen described herein is TNFR2, including human, cynomolgus, and/or mouse TNFR2.

[0196] The term “epitope” can refer to an antigenic determinant on the surface of an antigen to which an antibody molecule binds. A single antigen may have more than one epitope. Thus, different antibodies may bind to different areas on an antigen and may have different biological effects (e.g., agnostic, or antagonistic effects). Epitopes may be either conformational or linear. A conformational epitope is formed by spatially juxtaposed amino acids from different segments of the linear polypeptide chain. A linear epitope is formed by adjacent amino acid residues in a polypeptide chain. In some cases, an epitope may include non-peptidic moieties on the antigen, such as saccharides, phosphoryl groups, or sulfonyl groups.

[0197] The term “antigen-binding protein” refers in its broadest sense to a protein that specifically binds an antigen (e.g., TNFR2). In certain embodiments, an antigen-binding protein is an antibody or an antigen-binding fragment of an antibody, such as a human antibody, a humanized antibody; a camelid antibody; a chimeric antibody; a recombinant antibody; a heavy chain antibody; a single-domain antibody (e.g., VHH); a single chain antibody (e.g., single chain fragment variable (scFv)); a diabody; a triabody; a tetrabody; a Fab fragment; a F(ab′)2 fragment; an IgD antibody; an IgE antibody; an IgM antibody; an IgG1 antibody; an IgG2 antibody; an IgG3 antibody; or an IgG4 antibody, and fragments thereof. The term “antigen-binding protein” also encompasses, for example, an alternative protein scaffold or artificial scaffold with grafted CDRs or CDR derivatives. Such scaffolds include, but are not limited to, antibody-derived scaffolds comprising mutations introduced to, for example, stabilize the three-dimensional structure of the antigen-binding protein as well as wholly synthetic scaffolds comprising, for example, a biocompatible polymer. In addition, peptide antibody mimetics can be used, as well as scaffolds based on antibody mimetics utilizing fibronectin components (e.g., fibronectin type III domain (FN3) as a scaffold.

[0198] The term “antibody” and “immunoglobulin” or “lg” are used interchangeably herein, and is used in the broadest sense and encompasses, for example, individual monoclonal antibodies (including agonist, antagonist, neutralizing antibodies, full length or intact monoclonal antibodies), antibody compositions with polyepitopic or monoepitopic specificity, polyclonal antibodies, monovalent antibodies, multivalent antibodies, multispecific antibodies (e.g., bispecific antibodies), single-domain antibodies (e.g., VHH), single chain antibodies, intrabodies, anti-idiotypic (anti-Id) antibodies, and antigen-binding fragments of antibodies, as described below. An antibody can be human, humanized, camelized, recombinantly produced, chimeric, synthetic, affinity de-matured and/or affinity matured as well as an antibody from other species, for example mouse, camel, llama, rabbit, etc. In specific embodiments, the specific target antigen that can be bound by an antibody provided herein includes a TNFR2 polypeptide, TNFR2 fragment or TNFR2 epitope. An “antigen-binding fragment” generally refers a portion of an antibody heavy and/or light chain polypeptide that retains some or all of the binding activity of the antibody from which the fragment was derived. Non-limiting examples of antigen-binding fragments include single-domain antibody (e.g., VHH), single-chain Fvs (scFv), Fab fragments, F(ab′) fragments, F(ab)2 fragments, F(ab′)2 fragments, disulfide-linked Fvs (sdFv), Fd fragments, Fv fragments, diabody, triabody, tetrabody and minibody, or a chemically modified derivative thereof. In particular, antibodies provided herein include immunoglobulin molecules and molecules that contain immunologically active portion(s) of an immunoglobulin molecule, for example, one or more complementarity determining regions (CDRs) of an antibody that binds to TNFR2. Such antibody fragments can be found described in, for example, Harlow and Lane, Antibodies: A Laboratory Manual, Cold Spring Harbor Laboratory, New York (1989); Myers (ed.), Molec. Biology and Biotechnology: Å Comprehensive Desk Reference, New York: VCH Publisher, Inc.; Huston et al., Cell Biophysics, 22:189-224 (1993); Plückthun and Skerra, Meth. Enzymol., 178:497-515 (1989) and in Day, E.D., Advanced Immunochemistry, Second Ed., Wiley-Liss, Inc., New York, N.Y. (1990). The antibodies provided herein can be of any type (e.g., IgG, IgE, IgM, IgD, IgA and IgY), any class (e.g., IgG1, IgG2, IgG3, IgG4, IgA1 and IgA2), or any subclass (e.g., IgG2a and IgG2b) of immunoglobulin molecule.

[0199] The term “single-domain antibody” or “sdAb” as used herein, refers to an antibody or antibody fragment containing a single antibody variable domain that is able to bind to a specific antigen alone, without the requirement of another antibody variable domain. The complementary determining regions (CDRs) of a single-domain antibody are part of a single antibody variable domain. Examples of single-domain antibodies include, but are not limited to, heavy chain antibodies, antibodies naturally devoid of light chains, single domain antibodies derived from conventional four-chain antibodies, engineered antibodies, variable domains derived from the aforementioned antibodies, and single domain scaffolds other than those derived from antibodies. Single domain antibodies may be derived from any species including, but not limited to mouse, human, camel, llama, shark, goat, rabbit, and/or bovine. In some embodiments, a single domain antibody as used herein is a naturally occurring single domain antibody known as heavy chain antibody devoid of light chains. For clarity reasons, the variable domain derived from a heavy chain antibody naturally devoid of light chain is known herein as a VHH to distinguish it from the conventional VH of four-chain immunoglobulins. Such a VHH molecule can be derived from antibodies raised in Camelidae species, e.g., camel, llama, dromedary, alpaca, and guanaco. Other species besides Camelidae may produce heavy chain antibodies naturally devoid of light chain, which are also within the scope of the invention. For example, cartilaginous fishes such as sharks can produce immunoglobulin-like structures known as VNAR. In some embodiments, a single-domain antibody may be obtained from a Camelidae VH domain. In some embodiments, a single-domain antibody may be obtained from human VH by camelization. See Saerens et al., Current Opinion in Pharmacology, 2008, 8:600-608, the disclosure of which being incorporated by reference, for review of single-domain antibodies.

[0200] The term “specifically binds” as used herein means that an antigen-binding protein forms a complex with a target antigen that is relatively stable under physiologic conditions. Specific binding can be characterized by a dissociation constant (K_{D}) of about 1×10⁻⁶ M or less (e.g., less than 10⁻⁶ M, less than 5×10⁻⁷M, less than 10⁻⁷ M, less than 5×10⁻⁸ M, less than 10⁻⁸ M, less than 5×10⁻⁹ M, less than 10⁻⁹M, or less than 10⁻¹⁰ M). Methods for determining the binding affinity of an antigen-binding protein, e.g., an antibody or an antibody fragment, to a target antigen are well known in the art and include, e.g., surface plasmon resonance (e.g., BIACORE® assays), bio-layer interferometry, ligand binding assays (e.g., enzyme-linked immunosorbent assay (ELISA)), equilibrium dialysis, fluorescent-activated cell sorting (FACS), or flow cytometry-based binding assays and the like. Specific binding to a particular target antigen from a certain species does not exclude that the antigen-binding protein can also specifically bind to the analogous target from a different species. For example, specific binding to human TNFR2 does not exclude that the antigen-binding protein can also specifically bind to TNFR2 from cynomolgus monkeys (“cyno”).

[0201] The term “isolated” when used in the context of antigen-binding proteins (e.g., antibodies, such as single-domain antibodies), polypeptides, polynucleotides, and vectors, means the antigen-binding proteins (e.g., antibodies, such as single-domain antibodies), polypeptides, polynucleotides and vectors are at least partially free of other biological molecules from the cells or cell culture from which they are produced. Such biological molecules include nucleic acids, proteins, other antibodies or antigen-binding fragments, lipids, carbohydrates, or other material such as cellular debris and growth medium. An isolated antigen-binding protein may further be at least partially free of expression system components such as biological molecules from a host cell or of the growth medium thereof. Generally, the term “isolated” is not intended to refer to a complete absence of such biological molecules (e.g., minor, or insignificant amounts of impurity may remain) or to an absence of water, buffers, or salts or to components of a pharmaceutical formulation that includes the antigen-binding proteins (e.g., antibodies, such as single-domain antibodies).

[0202] The term “operably linked” as used herein can refer to a functional relationship between two or more regions of a polypeptide chain in which the two or more regions are linked so as to produce a functional polypeptide.

[0203] As used herein, the term “variant”, “derivative” or “derived from” in the context of proteins or polypeptides (e.g., antigen-binding proteins or domains thereof) refer to: (a) a polypeptide that has at least 40%, 45%, 50%, 55%, 60%, 65%, 70%, 75%, 80%, 85%, 90%, 95%, 98% or 99% sequence identity to the polypeptide it is a variant or derivative of; (b) a polypeptide encoded by a nucleotide sequence that has at least 40%, 45%, 50%, 55%, 60%, 65%, 70%, 75%, 80%, 85%, 90%, 95%, 98% or 99% sequence identity to a nucleotide sequence encoding the polypeptide it is a variant or derivative of; (c) a polypeptide that contains 1, 2, 3, 4, 5, 6, 7, 8, 9, 10, 11, 12, 13, 14, 15, 16, 17, 18, 19, 20 or more amino acid mutations (i.e., additions, deletions and/or substitutions) relative to the polypeptide it is a variant or derivative of; (d) a polypeptide encoded by nucleic acids can hybridize under high, moderate or typical stringency hybridization conditions to nucleic acids encoding the polypeptide it is a variant or derivative of; (e) a polypeptide encoded by a nucleotide sequence that can hybridize under high, moderate or typical stringency hybridization conditions to a nucleotide sequence encoding a fragment of the polypeptide, it is a variant or derivative of, of at least 20 contiguous amino acids, at least 30 contiguous amino acids, at least 40 contiguous amino acids, at least 50 contiguous amino acids, at least 75 contiguous amino acids, at least 100 contiguous amino acids, at least 125 contiguous amino acids, or at least 150 contiguous amino acids; or (f) a fragment of the polypeptide it is a variant or derivative of. The terms also encompass a fusion protein or polypeptide comprising the polypeptide it is a variant or derivative of.

[0204] The term “substantial identity” or “substantially identical,” when referring to a nucleic acid or fragment thereof, indicates that, when optimally aligned with appropriate nucleotide insertions or deletions with another nucleic acid (or its complementary strand), there is nucleotide sequence identity in at least about 95%, and more preferably at least about 96%, 97%, 98% or 99% of the nucleotide bases, as measured by any well-known algorithm of sequence identity, such as FASTA, BLAST or Gap, as discussed below. A nucleic acid molecule having substantial identity to a reference nucleic acid molecule may, in certain instances, encode a polypeptide having the same or substantially similar amino acid sequence as the polypeptide encoded by the reference nucleic acid molecule.

[0205] As applied to polypeptides, the term “substantial similarity” or “substantially similar” means that two peptide sequences, when optimally aligned, such as by the programs GAP or BESTFIT using default gap weights, share at least 95% sequence identity, even more preferably at least 98% or 99% sequence identity. Preferably, residue positions which are not identical differ by conservative amino acid substitutions. A “conservative amino acid substitution” is one in which an amino acid residue is substituted by another amino acid residue having a side chain (R group) with similar chemical properties (e.g., charge or hydrophobicity). In general, a conservative amino acid substitution will not substantially change the functional properties of a protein. In cases where two or more amino acid sequences differ from each other by conservative substitutions, the percent sequence identity or degree of similarity may be adjusted upwards to correct for the conservative nature of the substitution. Means for making this adjustment are well-known to those of skill in the art. See, e.g., Pearson (1994) Methods Mol. Biol. 24:307-331, herein incorporated by reference. Examples of groups of amino acids that have side chains with similar chemical properties include (1) aliphatic side chains: glycine, alanine, valine, leucine and isoleucine; (2) aliphatic-hydroxyl side chains: serine and threonine; (3) amide-containing side chains: asparagine and glutamine; (4) aromatic side chains: phenylalanine, tyrosine, and tryptophan; (5) basic side chains: lysine, arginine, and histidine; (6) acidic side chains: aspartate and glutamate, and (7) sulfur-containing side chains are cysteine and methionine. Preferred conservative amino acids substitution groups are valine-leucine-isoleucine, phenylalanine-tyrosine, lysine-arginine, alanine-valine, glutamate-aspartate, and asparagine-glutamine. Alternatively, a conservative replacement is any change having a positive value in the PAM250 log-likelihood matrix disclosed in Gonnet et al. (1992) Science 256:1443-1445, herein incorporated by reference. A “moderately conservative” replacement is any change having a nonnegative value in the PAM250 log-likelihood matrix.

[0206] Sequence similarity for polypeptides, which is also referred to as sequence identity, is typically measured using sequence analysis software. Protein analysis software matches similar sequences using measures of similarity assigned to various substitutions, deletions, and other modifications, including conservative amino acid substitutions. For instance, GCG software contains programs such as Gap and Bestfit which can be used with default parameters to determine sequence homology or sequence identity between closely related polypeptides, such as homologous polypeptides from different species of organisms or between a wild-type protein and a mutein thereof. See, e.g., GCG Version 6.1. Polypeptide sequences also can be compared using FASTA using default or recommended parameters, a program in GCG Version 6.1. FASTA (e.g., FASTA2 and FASTA3) provides alignments and percent sequence identity of the regions of the best overlap between the query and search sequences (Pearson (2000) supra). Another preferred algorithm when comparing a sequence of the disclosure to a database containing a large number of sequences from different organisms is the computer program BLAST, especially BLASTP or TBLASTN, using default parameters. See, e.g., Altschul et al. (1990) J. Mol. Biol. 215:403-410 and Altschul et al. (1997) Nucleic Acids Res. 25:3389-402, each herein incorporated by reference.

[0207] The terms “enhance” or “promote,” or “increase,” or “expand,” or “improve” refer generally to the ability of a composition contemplated herein to produce, elicit, or cause a greater physiological response (i.e., downstream effects) compared to the response caused by either vehicle or a control molecule/composition. A measurable physiological response may include an increase in immune cell expansion, activation, effector function, persistence, and/or an increase in tumor cell death killing ability, among others apparent from the understanding in the art and the description herein. In certain embodiments, an “increased” or “enhanced” amount can be a “statistically significant” amount, and may include an increase that is 1.1, 1.2, 1.5, 2, 3, 4, 5, 6, 7, 8, 9, 10, 15, 20, 30 or more times (e.g., 500, 1000 times) (including all integers and decimal points in between and above 1, e.g., 1.5, 1.6, 1.7. 1.8, etc.) the response produced by vehicle or a control composition.

[0208] The terms “decrease” or “lower,” or “lessen,” or “reduce,” or “abate” refer generally to the ability of composition contemplated herein to produce, elicit, or cause a lesser physiological response (I.e., downstream effects) compared to the response caused by either vehicle or a control molecule/composition. In certain embodiments, a “decrease” or “reduced” amount can be a “statistically significant” amount, and may include a decrease that is 1.1, 1.2, 1.5, 2, 3, 4, 5, 6, 7, 8, 9, 10, 15, 20, 30 or more times (e.g., 500, 1000 times) (including all integers and decimal points in between and above 1, e.g., 1.5, 1.6, 1.7. 1.8, etc.) the response (reference response) produced by vehicle or a control composition.

[0209] The terms “treat” or “treatment” of a state, disorder or condition include: (1) preventing, delaying, or reducing the incidence and/or likelihood of the appearance of at least one clinical or sub-clinical symptom of the state, disorder or condition developing in a subject that may be afflicted with or predisposed to the state, disorder or condition, but does not yet experience or display clinical or subclinical symptoms of the state, disorder or condition; or (2) inhibiting the state, disorder or condition, i.e., arresting, reducing or delaying the development of the disease or a relapse thereof or at least one clinical or sub-clinical symptom thereof; or (3) relieving the disease, i.e., causing regression of the state, disorder or condition or at least one of its clinical or sub-clinical symptoms. The benefit to a subject to be treated is either statistically significant or at least perceptible to the patient or to the physician.

[0210] The terms “effective amount” or “therapeutically effective amount” refer to a quantity and/or concentration of a composition containing an active ingredient (e.g., anti-TNFR2 antigen-binding protein) that when administered into a patient either alone (i.e., as a monotherapy) or in combination with additional therapeutic agents, yields a significant decrease in disease progression as, for example, by ameliorating or eliminating symptoms and/or the cause of the disease. An effective amount may be an amount that relieves, lessens, or alleviates at least one symptom or biological response or effect associated with a disease or disorder, prevents progression of the disease or disorder, or improves physical functioning of the patient. A therapeutically effective amount of a composition containing an active agent may vary according to factors such as the disease state, age, sex, and weight of the individual, and the ability of the active agent to elicit a desired response in the individual. A therapeutically effective amount is also one in which any toxic or detrimental effects of the active agent are outweighed by the therapeutically beneficial effects. A therapeutically effective amount may be delivered in one or more administrations. A therapeutically effective amount refers to an amount effective, at dosages and for periods of time necessary, to achieve the desired therapeutic and/or prophylactic result.

[0211] The terms “individual”, “subject” and “patient” are used interchangeably herein to refer to an animal; for example a mammal. The terms include human and veterinary subjects. In some embodiments, methods of treating mammals, Including, but not limited to, humans, rodents, simians, felines, canines, equines, bovines, porcines, ovines, caprines, mammalian laboratory animals, mammalian farm animals, mammalian sport animals, and mammalian pets, are provided. The subject can be male or female and can be any suitable age, including infant, juvenile, adolescent, adult, and geriatric subjects. In some embodiments, a subject can be a subject in need of treatment for a disease or disorder. In particular embodiments, the subject is a human.

### Anti-TNFR2 Antigen-Binding Proteins

[0212] The present disclosure provides antigen-binding proteins (e.g., antibodies, such as single-domain antibodies) that bind to tumor necrosis factor receptor 2 (TNFR2).

[0213] TNFR2 is a single pass type-1 membrane protein belonging to the TNFR superfamily. It consists of an extracellular domain with four cysteine rich domains (CRD) and an intracellular domain that is involved in signaling. The cysteine rich domains contain a total of 10 disulfide bonds stabilizing the elongated structure of the protein. Unlike TNFR1 which is widely expressed, the expression of TNFR2 is restricted on immune cells including Tregs, myeloid cells, CD8 and NK cells but also glial cells, endothelial cells, and fibroblasts (Medler and Wajant, 2019).

[0214] In some embodiments, the human TNFR2 protein is encoded by the human TNF receptor superfamily member 1B (TNFRSF1B) gene (NCBI Gene ID: 7133) and has the amino acid sequence of

(SEQ ID NO: 4028)
MAPVAVWAALAVGLELWAAAHALPAQVAFTPYAPEPGSTCRLREYYDQTAQMCCSKCSPGQHAKVFCTKTSDTVCD
SCEDSTYTQLWNWVPECLSCGSRCSSDQVETQACTREQNRICTCRPGWYCALSKQEGCRLCAPLRKCRPGFGVARPG
TETSDVVCKPCAPGTFSNTTSSTDICRPHQICNVVAIPGNASMDAVCTSTSPTRSMAPGAVHLPQPVSTRSQHTQPTPE
PSTAPSTSFLLPMGPSPPAEGSTGDFALPVGLIVGVTALGLLIIGVVNCVIMTQVKKKPLCLQREAKVPHLPADKARGTQ
GPEQQHLLITAPSSSSSSLESSASALDRRAPTRNQPQAPGVEASGAGEARASTGSSDSSPGGHGTQVNVTCIVNVCSSS
DHSSQCSSQASSTMGDTDSSPSESPKDEQVPFSKEECAFRSQLETPETLLGSTEEKPLPLGVPDAGMKPS (UniProtKB
Accession No. P20333)

[0215] In some embodiments, the cyno TNFR2 protein is encoded by the Cyno TNF receptor superfamily member 1B (TNFRSF1B) gene (Gene ID: 102144224) and has the amino acid sequence of

(SEQ ID NO: 4029)
MVTRRGGDDRRRLKGHRVLGVTLEVLARRCWGGRVGGPAEAGEGRGGGVSKAGWPRPAPPRCLASGPLQRGLSLS
VAAGWRAQRSLGRRRCAARARGREGRGNRIPPAPMAPAAVWAALAVGLELWAAGHALPÅQVAFTPYAPEPGGTCR
LREYYDQTAQMCCSKCPPGQHAKVFCTKTSDTVCDSCEDSTYTQLWNWVPECLSCGSRCSSDQVETQACTREQNRIC
TCRPGWYCALSKQEGCRLCAQLRKCRPGFGVARPGTETSDVVCKPCAPGTFSNTTSSTDICRPHQICHVVAIPGNASM
DAVCTSTSPTRSMAPGAVHLPQPVSTRSQHTQPTPAPSTAPGTSFLLPVGPSPPAEGSTGDIVLPVGLIVGVTALGLLIIG
VVNCVIMTQVKKKPLCLORETKVPHLPADKARGAQGPEQQHLLTTVPSSSSSSLESSASALDRRAPTRNQPQAPGAEK
ASGAGEARASTGSSDSSPGGHGTQVNVTCIVNVCSSSDHSSQCSSQASSTMGDTDASPSGSPKDEQVPFSKEECAFRS
QLETPETLLGSTEEKPLPLGVPDAGMKPS (UniProtKB Accession No. A0A2KSVET2)

[0216] In some embodiments, the mouse TNFR2 protein is encoded by the mouse TNF receptor superfamily member 1B (Tnfrsf1b) gene (Gene ID: 21938) and has the amino acid sequence of

(SEQ ID NO: 4030)
MAPAALWVALVFELQLWATGHTVPAQVVLTPYKPEPGYECQISQEYYDRKAQMCCAKCPPGQYVKHFCNKTSDTVC
ADCEASMYTQVWNQFRTCLSCSSSCTTDQVEIRACTKQQNRVCACEAGRYCALKTHSGSCRQCMRLSKCGPGFGVAS
SRAPNGNVLCKACAPGTFSDTTSSTDVCRPHRICSILAIPGNASTDAVCAPESPTLSAIPRTLYVSQPEPTRSQPLDQEPG
PSQTPSILTSLGSTPIIEQSTKGGISLPIGLIVGVTSLGLLMLGLVNCIILVQRKKKPSCLQRDAKVPHVPDEKSQDAVGLEQ
QHLLTTAPSSSSSSLESSASAGDRRAPPGGHPQARVMAEAQGFQEARASSRISDSSHGSHGTHVNVTCIVNVCSSSDHS
SQCSSQASATVGDPDAKPSASPKDEQVPFSQEECPSQSPCETTETLQSHEKPLPLGVPDMGMKPSQAGWFDQIAVKV
A (UniProtKB Accession No. P25119)

[0217] In various embodiments, antigen-binding proteins of the present disclosure have an agonist effect upon binding to TNFR2. While not wishing to be bound by theory, an agonistic TNFR2 binder can promote or increase activation of TNFR2 and/or potentiate one or more signal transduction pathways mediated by TNFR2. For example, agonistic TNFR2 binders may promote or increase the proliferation of a population of Treg cells. Agonistic TNFR2 binders may promote or increase TNFR2 activation by binding TNFR2, e.g., to induce a conformational change that renders the receptor biologically active. For example, agonistic TNFR2 binders may nucleate the trimerization of TNFR2 in a manner similar to the interaction between TNFR2 and its cognate ligand, tumor necrosis factor (TNF), thus inducing TNFR2-mediated signaling. In some embodiments, agonistic TNFR2 binding proteins of the present disclosure may be capable of inducing the proliferation of Treg cells (e.g., CD4+, CD25+, FOXP3+ Treg cells). Agonistic TNFR2 binding proteins of the present disclosure may also be capable of suppressing the proliferation of cytotoxic T lymphocytes (e.g., CD8+ T-cells), e.g., through activation of immunomodulatory Treg cells or by directly binding TNFR2 on the surface of an autoreactive cytotoxic T-cell and inducing apoptosis.

[0218] In some embodiments, antigen-binding proteins of the present disclosure upon binding to TNFR2 do not impair the binding of its cognate ligand, tumor necrosis factor (TNF), to TNFR2. In some embodiments, antigen-binding proteins of the present disclosure do not have overlapping epitopes with TNF. In some embodiments, antigen-binding proteins of the present disclosure have overlapping epitopes with TNF. In some embodiments, antigen-binding proteins of the present disclosure upon binding to TNFR2 promote or facilitate TNFR2 oligomerization (in the presence or absence of TNF, respectively). In some embodiments, antigen-binding proteins of the present disclosure upon binding to TNFR2 multimerize (e.g., dimerize) the TNFR2 trimers to induce intracellular signaling.

[0219] In some embodiments, antigen-binding proteins of the present disclosure bind to human TNFR2. In some embodiments, antigen-binding proteins (e.g., antibodies such as single-domain antibodies) of the present disclosure may bind to human TNFR2 with a K_{D} of less than about 1×10⁻⁶ M, for example, less than about 5×10⁻⁷ M, less than about 3×10⁻⁷ M, less than about 1×10⁻⁷ M, less than about 8×10⁻⁸ M, less than about 5×10⁻⁸ M, less than about 3×10⁻⁸ M, less than about 1×10⁻⁸ M, less than about 8×10⁻⁹ M, less than about 5×10⁻⁹ M, less than about 3×10⁻⁹ M, or less than about 1×10⁻⁹ M, or about 1×10⁻¹⁰ to 1×10⁻⁹ M, 1×10⁻¹⁰ to 5×10⁻⁹ M, about 1×10⁻¹⁰ to 1×10⁻⁸ M, about 1×10⁻¹⁰ to 5×10⁻⁸ M, about 1×10⁻⁹ to 1×10⁻⁸ M, about 1×10⁻³ to 5×10⁻⁸ M, about 1×10⁻⁹ to 1×10⁻⁷ M, or about 1×10⁻⁸ to 1×10⁻⁷ M.

[0220] In some embodiments, antigen-binding proteins of the present disclosure bind to cynomolgus monkey (“cyno”) TNFR2. In some embodiments, antigen-binding proteins (e.g., antibodies such as single-domain antibodies) of the present disclosure may bind to cyno TNFR2 with a K_{D} of less than about 1×10⁻⁶ M, for example, less than about 5×10⁻⁷ M, less than about 3×10⁻⁷ M, less than about 1×10⁻⁷M, less than about 8×10⁻⁸ M, less than about 5×10⁻⁸ M, less than about 3×10⁻⁸ M, less than about 1×10⁻⁸ M, less than about 8×10⁻⁹ M, less than about 5×10⁻⁹ M, less than about 3×10⁻⁹ M, or less than about 1×10⁻⁹ M, or about 1×10⁻¹⁰ to 1×10⁻⁹ M, 1×10⁻¹⁰ to 5×10⁻⁹ M, about 1×10⁻¹⁰ to 1×10⁻⁸ M, about 1×10⁻¹⁰ to 5×10⁻⁸ M, about 1×10⁻⁹ to 1×10⁻⁸ M, about 1×10⁻⁹ to 5×10⁻⁸ M, about 1×10⁻⁹ to 1×10⁻⁷ M, about 1×10⁻⁹ to 2×10⁻⁷ M, about 1×10⁻⁹ to 5×10⁻⁷ M, about 1×10⁻⁸ to 1×10⁻⁷ M, about 1×10⁻⁸ to 2×10⁻⁷ M, about 1×10⁻⁸ to 5×10⁻⁷ M, or about 1×10⁻⁸ to 1×10⁻⁶ M.

[0221] In some embodiments, antigen-binding proteins of the present disclosure bind to mouse TNFR2. In some embodiments, antigen-binding proteins of the present disclosure may bind to mouse TNFR2 with a K_{D} of less than about 1×10⁻⁶ M, for example, less than about 5×10⁻⁷ M, less than about 3×10⁻⁷ M, less than about 1×10⁻⁷ M, less than about 8×10⁻⁸ M, less than about 5×10⁻³ M, less than about 3×10⁻⁸ M, less than about 1×10⁻⁸ M, less than about 8×10⁻⁹ M, less than about 5×10⁻⁹ M, less than about 3×10⁻⁹ M, or less than about 1×10⁻³ M, or about 1×10⁻¹⁰ to 1×10⁻⁹ M, 1×10⁻¹⁰ to 5×10⁻⁹ M, about 1×10⁻¹⁰ to 1×10⁻⁸ M, about 1×10⁻¹⁰ to 5×10⁻⁸ M, about 1×10⁻⁹ to 1×10⁻¹⁰ M, about 1×10⁻⁹ to 5×10⁻⁸ M, about 1×10⁻⁹ to 1×10⁻⁷ M, about 1×10⁻⁹ to 2×10⁻⁷ M, about 1×10⁻⁹ to 5×10⁻⁷ M, about 1×10⁻⁸ to 1×10⁻⁷ M, about 1×10⁻⁸ to 2×10⁻⁷ M, about 1×10⁻⁸ to 5×10⁻⁷ M, or about 1×10⁻⁸ to 1×10⁻⁶ M. In some embodiments, antigen-binding proteins of the present disclosure do not bind to mouse TNFR2.

[0222] In some embodiments, anti-TNFR2 antigen-binding proteins of the present disclosure may specifically bind TNFR2 without exhibiting specific binding for another receptor of the tumor necrosis factor receptor (TNFR) superfamily.

[0223] Binding affinity of a molecular interaction between two molecules can be measured via various techniques, such as surface plasmon resonance (SPR), bio-layer interferometry (BLI), enzyme-linked immunosorbent assay (ELISA), equilibrium dialysis, fluorescent-activated cell sorting (FACS), or flow cytometry binding assays and the like. Surface plasmon resonance is a biosensor technique that allows for the analysis of real-time biospecific interactions by detection of alterations in protein concentrations within a biosensor matrix, where one molecule is immobilized on the biosensor chip and the other molecule is passed over the immobilized molecule under flow conditions (see e.g., Ober et al. 2001, Intern. Immunology 13:1551-1559). SPR can for example be performed using the BIACORE® system or Carterra LSA system. Another biosensor technique that can be used to determine affinities of biomolecular interactions is bio-layer interferometry (BLI) (see e.g., Abdiche et al. 2008, Anal. Biochem. 377:209-217). Bio-layer interferometry is a label-free optical technique that analyzes the interference pattern of light reflected from two surfaces: an internal reference layer (reference beam) and a layer of immobilized protein on the biosensor tip (signal beam). A change in the number of molecules bound to the tip of the biosensor causes a shift in the interference pattern, reported as a wavelength shift (nm), the magnitude of which is a direct measure of the number of molecules bound to the biosensor tip surface. Since the interactions can be measured in real-time, association and dissociation rates and affinities can be determined. BUI can for example be performed using the Octet® Systems. Alternatively, affinities can be measured in Kinetic Exclusion Assay (KinExA) (see e.g., Drake et al. 2004, Anal. Biochem., 328:35-43), which is a solution-based method to measure true equilibrium binding affinity and kinetics of unmodified molecules. Equilibrated solutions of an antibody/antigen complex are passed over a column with beads precoated with antigen (or antibody), allowing the free antibody (or antigen) to bind to the coated molecule. Detection of the antibody (or antigen) thus captured is accomplished with a fluorescently labeled protein binding the antibody (or antigen).

[0224] Antigen-binding proteins of the present disclosure can include an antibody or an antigen-binding fragment of an antibody, such as a human antibody, a humanized antibody; a camelid antibody; a chimeric antibody; a recombinant antibody; a heavy chain antibody; a single-domain antibody (e.g., VHH); a single chain antibody (e.g., single chain fragment variable (scFv)); a diabody; a triabody; a tetrabody; a Fab fragment; a F(ab′)2 fragment; an IgD antibody; an IgE antibody; an IgM antibody; an IgG1 antibody; an IgG2 antibody; an IgG3 antibody; or an IgG4 antibody, and fragments thereof.

[0225] In some embodiments, an antigen-binding protein that binds to TNFR2 is a single-domain antibody (also termed as “sdAb”). The single-domain antibodies of the present disclosure can be derived from numerous sources, including but not limited to VHHs, VNARs, or VH domains (naturally occurring or engineered VH domains). VHHs can be generated from camelid heavy chain only antibodies and libraries thereof. VNARs can be generated from cartilaginous fish heavy chain only antibodies and libraries thereof. Various methods have been implemented to generate monomeric sdAbs from conventionally heterodimeric VH and VL domains, including interface engineering and selection of specific germline families. In some embodiments, the sdAb of the present invention are human or humanized.

[0226] In some embodiments, a single-domain antibody described herein is a VHH fragment (also known as a nanobody). VHH fragments are also referred to as “V-bodies” in the present disclosure. In some embodiments, the VHH is a camelid VHH, a humanized VHH or a camelized VH. In some embodiments, a single-domain antibody described herein is a VH domain. In some embodiments, a single-domain antibody described herein is a naturally occurring VH domain or engineered VH domain.

[0227] The variable domain of an antigen-binding protein (e.g., antibody such as a single-domain antibody) of the present disclosure comprises at least three complementarity determining regions (CDRs) which determine its binding specificity. Preferably, in a variable domain, the CDRs are distributed between framework regions (FRs). The variable domain typically contains 4 framework regions interspaced by 3 CDR regions, resulting in the following typical antibody variable domain structure: FR1-CDR1-FR2-CDR2-FR3-CDR3-FR4. CDRs and/or FRs of the single domain antibody of the invention may be fragments or derivatives from a naturally occurring antibody variable domain or may be synthetic.

[0228] Sequence identifiers corresponding to exemplary anti-TNFR2 VHH antibodies provided herein are listed in Table 1-1. Table 1-1 sets forth the sequence identifiers of amino acid sequences of the complementarity determining regions (CDR1, CDR2 and CDR3), amino acid and DNA sequences of the full-length camelid VHH antibodies, as well as amino acid sequences of corresponding humanized VHH antibodies. Amino acid sequences of additional exemplary anti-TNFR2 VHH antibodies and corresponding humanized VHH antibodies are provided in Table 1-2.

TABLE 1-1
Sequence identifiers for exemplary anti-TNFR2 VHH antibodies

| | | CDR1 | CDR2 | CDR3 | Non-humanized VHH | | Humanized |
|---|---|---|---|---|---|---|---|
| | | Amino | Amino | Amino | Amino | | VHH |
| | | acid | acid | acid | acid | DNA | Amino acid |
| Antibody ID | Group | sequence | sequence | sequence | sequence | sequence | sequence |
| ODY-31G3 | A | 1 | 2 | 3 | 4 | 48 | 81 |
| ODY-31D6 | A | 5 | 2 | 6 | 7 | 49 | 82 |
| ODY-37C7 | B | 8 | 9 | 10 | 11 | 50 | 83 |
| ODY-N2166hu1 | B | 8 | 9 | 4524 | — | — | 4526 |
| ODY-31G11 | C | 12 | 13 | 14 | 15 | 51 | 84 |
| ODY-33D4 | D | 16 | 17 | 18 | 19 | 52 | 85 |
| ODY-N2170hu1 | D | 16 | 4527 | 18 | — | — | 4529 |
| ODY-N2170hu1.A3 | D | 16 | 4527 | 4530 | — | — | 4532 |
| ODY-N1876Hu1 | D | 4719 | 4723 | 4727 | — | — | 4731 |
| ODY-N1876Hu1.NAR | D | 4720 | 4724 | 4728 | — | — | 4732 |
| ODY-N1879Hu1 | D | 4721 | 4725 | 4729 | — | — | 4733 |
| ODY-N1879Hu1.NAR | D | 4722 | 4726 | 4730 | — | — | 4734 |
| ODY-N1277 | G | 20 | 21 | 22 | 23 | 53 or 3765 | 86 |
| ODY-N1364 | J | 24 | 25 | 26 | 27 | 54 or 3800 | 87 |
| ODY-N1365 | J | 28 | 29 | 30 | 31 | 55 or 3768 | 88 |
| ODY-35A10 | K | 32 | 33 | 34 | 35 | 56 | 89 |
| ODY-N1402 | K | 36 | 37 | 38 | 39 | 57 or 3839 | 90 |
| ODY-N1400 | K | 4069 | 4070 | 4071 | 4072 | 4075 | 4078 |
| ODY-N1425 | L | 40 | 41 | 42 | 43 | 58 or 3844 | 91 |
| ODY-N1409 | M | 44 | 45 | 46 | 47 | 59 or 3845 | 92 |
| ODY-N1943 | M | 4520 | 45 | 46 | 4521 | 4522 | 4523 |
| ODY-N1323 | N | 4061 | 4062 | 4063 | 4064 | 4073 | 4076 |
| ODY-33B1 | O | 4065 | 4066 | 4067 | 4068 | 4074 | 4077 |

TABLE 1-2
Sequence identifiers for additional exemplary
VHH antibodies and humanized VHH antibodies

| | | Non-humanized | Humanized |
|---|---|---|---|
| | | VHH Amino | VHH Amino |
| | | Acid | Acid |
| Cluster | Group | Sequence | Sequence |
| ODY-31G3 - 31D6 | A | 93 | 641 |
| ODY-31G3 - 31D6 | A | 94 | 642 |
| ODY-31G3 - 31D6 | A | 95 | 643 |
| ODY-31G3 - 31D6 | A | 4 | 81 |
| ODY-31G3 - 31D6 | A | 96 | 82 |
| ODY-31G3 - 31D6 | A | 7 | 82 |
| ODY-31G3 - 31D6 | A | 97 | 82 |
| ODY-31G3 - 31D6 | A | 98 | 644 |
| ODY-31G3 - 31D6 | A | 99 | 645 |
| ODY-31G3 - 31D6 | A | 100 | 646 |
| ODY-31G3 - 31D6 | A | 101 | 647 |
| ODY-31G3 - 31D6 | A | 102 | 648 |
| ODY-31G3 - 31D6 | A | 103 | 649 |
| ODY-31G3 - 31D6 | A | 104 | 650 |
| ODY-31G3 - 31D6 | A | 105 | 651 |
| ODY-31G3 - 31D6 | A | 106 | 652 |
| ODY-31G3 - 31D6 | A | 107 | 653 |
| ODY-31G3 - 31D6 | A | 108 | 654 |
| ODY-31G3 - 31D6 | A | 109 | 655 |
| ODY-31G3 - 31D6 | A | 110 | 656 |
| ODY-31G3 - 31D6 | A | 111 | 657 |
| ODY-31G3 - 31D6 | A | 112 | 658 |
| ODY-31G3 - 31D6 | A | 113 | 659 |
| ODY-31G3 - 31D6 | A | 114 | 660 |
| ODY-31G3 - 31D6 | A | 115 | 661 |
| ODY-31G3 - 31D6 | A | 116 | 662 |
| ODY-31G3 - 31D6 | A | 117 | 663 |
| ODY-31G3 - 31D6 | A | 118 | 664 |
| ODY-31G3 - 31D6 | A | 119 | 665 |
| ODY-31G3 - 31D6 | A | 120 | 666 |
| ODY-31G3 - 31D6 | A | 121 | 667 |
| ODY-31G3 - 31D6 | A | 122 | 668 |
| ODY-31G3 - 31D6 | A | 123 | 669 |
| ODY-31G3 - 31D6 | A | 124 | 670 |
| ODY-31G3 - 31D6 | A | 125 | 671 |
| ODY-31G3 - 31D6 | A | 126 | 672 |
| ODY-31G3 - 31D6 | A | 127 | 673 |
| ODY-31G3 - 31D6 | A | 128 | 674 |
| ODY-31G3 - 31D6 | A | 129 | 647 |
| ODY-31G3 - 31D6 | A | 130 | 675 |
| ODY-31G3 - 31D6 | A | 131 | 676 |
| ODY-31G3 - 31D6 | A | 132 | 677 |
| ODY-31G3 - 31D6 | A | 133 | 655 |
| ODY-31G3 - 31D6 | A | 134 | 678 |
| ODY-31G3 - 31D6 | A | 135 | 679 |
| ODY-31G3 - 31D6 | A | 136 | 680 |
| ODY-31G3 - 31D6 | A | 137 | 681 |
| ODY-31G3 - 31D6 | A | 138 | 665 |
| ODY-31G3 - 31D6 | A | 139 | 682 |
| ODY-31G3 - 31D6 | A | 140 | 683 |
| ODY-31G3 - 31D6 | A | 141 | 684 |
| ODY-31G3 - 31D6 | A | 142 | 685 |
| ODY-31G3 - 31D6 | A | 143 | 686 |
| ODY-31G3 - 31D6 | A | 144 | 687 |
| ODY-31G3 - 31D6 | A | 145 | 688 |
| ODY-31G3 - 31D6 | A | 146 | 689 |
| ODY-31G3 - 31D6 | A | 147 | 690 |
| ODY-31G3 - 31D6 | A | 148 | 691 |
| ODY-31G3 - 31D6 | A | 149 | 692 |
| ODY-31G3 - 31D6 | A | 150 | 693 |
| ODY-31G3 - 31D6 | A | 151 | 694 |
| ODY-31G3 - 31D6 | A | 152 | 695 |
| ODY-31G3 - 31D6 | A | 153 | 696 |
| ODY-31G3 - 31D6 | A | 154 | 697 |
| ODY-31G3 - 31D6 | A | 155 | 698 |
| ODY-31G3 - 31D6 | A | 156 | 647 |
| ODY-31G3 - 31D6 | A | 157 | 699 |
| ODY-31G3 - 31D6 | A | 158 | 648 |
| ODY-31G3 - 31D6 | A | 159 | 700 |
| ODY-31G3 - 31D6 | A | 160 | 701 |
| ODY-31G3 - 31D6 | A | 161 | 702 |
| ODY-31G3 - 31D6 | A | 162 | 703 |
| ODY-31G3 - 31D6 | A | 163 | 704 |
| ODY-31G3 - 31D6 | A | 164 | 705 |
| ODY-31G3 - 31D6 | A | 165 | 706 |
| ODY-31G3 - 31D6 | A | 166 | 707 |
| ODY-31G3 - 31D6 | A | 167 | 708 |
| ODY-31G3 - 31D6 | A | 168 | 709 |
| ODY-31G3 - 31D6 | A | 169 | 82 |
| ODY-31G3 - 31D6 | A | 170 | 710 |
| ODY-31G3 - 31D6 | A | 171 | 645 |
| ODY-31G3 - 31D6 | A | 172 | 711 |
| ODY-31G3 - 31D6 | A | 173 | 712 |
| ODY-31G3 - 31D6 | A | 174 | 713 |
| ODY-31G3 - 31D6 | A | 175 | 714 |
| ODY-31G3 - 31D6 | A | 176 | 715 |
| ODY-31G3 - 31D6 | A | 177 | 716 |
| ODY-31G3 - 31D6 | A | 178 | 663 |
| ODY-31G3 - 31D6 | A | 179 | 712 |
| ODY-31G3 - 31D6 | A | 180 | 717 |
| ODY-31G3 - 31D6 | A | 181 | 718 |
| ODY-31G3 - 31D6 | A | 182 | 719 |
| ODY-31G3 - 31D6 | A | 183 | 720 |
| ODY-31G3 - 31D6 | A | 184 | 721 |
| ODY-31G3 - 31D6 | A | 185 | 722 |
| ODY-31G3 - 31D6 | A | 186 | 723 |
| ODY-31G3 - 31D6 | A | 187 | 724 |
| ODY-31G3 - 31D6 | A | 188 | 725 |
| ODY-31G3 - 31D6 | A | 189 | 726 |
| ODY-31G3 - 31D6 | A | 190 | 727 |
| ODY-31G3 - 31D6 | A | 191 | 728 |
| ODY-31G3 - 31D6 | A | 192 | 729 |
| ODY-31G3 - 31D6 | A | 193 | 724 |
| ODY-31G3 - 31D6 | A | 194 | 730 |
| ODY-31G3 - 31D6 | A | 195 | 731 |
| ODY-31G3 - 31D6 | A | 196 | 732 |
| ODY-31G3 - 31D6 | A | 197 | 733 |
| ODY-31G3 - 31D6 | A | 198 | 734 |
| ODY-31G3 - 31D6 | A | 199 | 735 |
| ODY-31G3 - 31D6 | A | 200 | 736 |
| ODY-31G3 - 31D6 | A | 201 | 737 |
| ODY-31G3 - 31D6 | A | 202 | 738 |
| ODY-31G3 - 31D6 | A | 203 | 739 |
| ODY-31G3 - 31D6 | A | 204 | 727 |
| ODY-31G3 - 31D6 | A | 205 | 740 |
| ODY-31G3 - 31D6 | A | 206 | 741 |
| ODY-31G3 - 31D6 | A | 207 | 742 |
| ODY-31G3 - 31D6 | A | 208 | 743 |
| ODY-31G3 - 31D6 | A | 209 | 744 |
| ODY-31G3 - 31D6 | A | 210 | 745 |
| ODY-31G3 - 31D6 | A | 211 | 746 |
| ODY-31G3 - 31D6 | A | 212 | 727 |
| ODY-31G3 - 31D6 | A | 213 | 747 |
| ODY-31G3 - 31D6 | A | 214 | 748 |
| ODY-31G3 - 31D6 | A | 215 | 749 |
| ODY-31G3 - 31D6 | A | 216 | 750 |
| ODY-31G3 - 31D6 | A | 217 | 751 |
| ODY-31G3 - 31D6 | A | 218 | 752 |
| ODY-31G3 - 31D6 | A | 219 | 753 |
| ODY-31G3 - 31D6 | A | 220 | 754 |
| ODY-31G3 - 31D6 | A | 221 | 755 |
| ODY-31G3 - 31D6 | A | 222 | 756 |
| ODY-31G3 - 31D6 | A | 223 | 757 |
| ODY-31G3 - 31D6 | A | 224 | 758 |
| ODY-31G3 - 31D6 | A | 225 | 759 |
| ODY-31G3 - 31D6 | A | 226 | 760 |
| ODY-31G3 - 31D6 | A | 227 | 761 |
| ODY-31G3 - 31D6 | A | 228 | 762 |
| ODY-31G3 - 31D6 | A | 229 | 752 |
| ODY-31G3 - 31D6 | A | 230 | 763 |
| ODY-31G3 - 31D6 | A | 231 | 764 |
| ODY-31G3 - 31D6 | A | 232 | 765 |
| ODY-31G3 - 31D6 | A | 233 | 766 |
| ODY-31G3 - 31D6 | A | 234 | 767 |
| ODY-31G3 - 31D6 | A | 235 | 768 |
| ODY-31G3 - 31D6 | A | 236 | 769 |
| ODY-31G3 - 31D6 | A | 237 | 770 |
| ODY-31G3 - 31D6 | A | 238 | 771 |
| ODY-31G3 - 31D6 | A | 239 | 772 |
| ODY-31G3 - 31D6 | A | 240 | 773 |
| ODY-31G3 - 31D6 | A | 241 | 774 |
| ODY-31G3 - 31D6 | A | 242 | 775 |
| ODY-31G3 - 31D6 | A | 243 | 776 |
| ODY-31G3 - 31D6 | A | 244 | 777 |
| ODY-31G3 - 31D6 | A | 245 | 778 |
| ODY-31G3 - 31D6 | A | 246 | 779 |
| ODY-31G3 - 31D6 | A | 247 | 780 |
| ODY-31G3 - 31D6 | A | 248 | 781 |
| ODY-31G3 - 31D6 | A | 249 | 782 |
| ODY-31G3 - 31D6 | A | 250 | 783 |
| ODY-31G3 - 31D6 | A | 251 | 784 |
| ODY-31G3 - 31D6 | A | 252 | 785 |
| ODY-31G3 - 31D6 | A | 253 | 786 |
| ODY-31G3 - 31D6 | A | 254 | 787 |
| ODY-31G3 - 31D6 | A | 255 | 788 |
| ODY-31G3 - 31D6 | A | 256 | 789 |
| ODY-31G3 - 31D6 | A | 257 | 790 |
| ODY-31G3 - 31D6 | A | 258 | 786 |
| ODY-31G3 - 31D6 | A | 259 | 791 |
| ODY-31G3 - 31D6 | A | 260 | 786 |
| ODY-31G3 - 31D6 | A | 261 | 776 |
| ODY-31G3 - 31D6 | A | 262 | 792 |
| ODY-31G3 - 31D6 | A | 263 | 793 |
| ODY-31G3 - 31D6 | A | 264 | 794 |
| ODY-31G3 - 31D6 | A | 265 | 795 |
| ODY-31G3 - 31D6 | A | 266 | 796 |
| ODY-31G3 - 31D6 | A | 267 | 796 |
| ODY-31G3 - 31D6 | A | 268 | 797 |
| ODY-31G3 - 31D6 | A | 269 | 798 |
| ODY-31G3 - 31D6 | A | 270 | 799 |
| ODY-31G3 - 31D6 | A | 271 | 800 |
| ODY-31G3 - 31D6 | A | 272 | 801 |
| ODY-31G3 - 31D6 | A | 273 | 802 |
| ODY-31G3 - 31D6 | A | 274 | 803 |
| ODY-31G3 - 31D6 | A | 275 | 804 |
| ODY-31G3 - 31D6 | A | 276 | 805 |
| ODY-31G3 - 31D6 | A | 277 | 806 |
| ODY-31G3 - 31D6 | A | 278 | 807 |
| ODY-31G3 - 31D6 | A | 279 | 808 |
| ODY-31G3 - 31D6 | A | 280 | 809 |
| ODY-31G3 - 31D6 | A | 281 | 810 |
| ODY-31G3 - 31D6 | A | 282 | 811 |
| ODY-31G3 - 31D6 | A | 283 | 812 |
| ODY-31G3 - 31D6 | A | 284 | 813 |
| ODY-31G3 - 31D6 | A | 285 | 814 |
| ODY-31G3 - 31D6 | A | 286 | 815 |
| ODY-31G3 - 31D6 | A | 287 | 816 |
| ODY-31G3 - 31D6 | A | 288 | 817 |
| ODY-31G3 - 31D6 | A | 289 | 818 |
| ODY-31G3 - 31D6 | A | 290 | 819 |
| ODY-31G3 - 31D6 | A | 291 | 820 |
| ODY-31G3 - 31D6 | A | 292 | 821 |
| ODY-31G3 - 31D6 | A | 293 | 822 |
| ODY-31G3 - 31D6 | A | 294 | 823 |
| ODY-31G3 - 31D6 | A | 295 | 806 |
| ODY-31G3 - 31D6 | A | 296 | 806 |
| ODY-31G3 - 31D6 | A | 297 | 824 |
| ODY-31G3 - 31D6 | A | 298 | 800 |
| ODY-31G3 - 31D6 | A | 299 | 803 |
| ODY-31G3 - 31D6 | A | 300 | 825 |
| ODY-31G3 - 31D6 | A | 301 | 826 |
| ODY-31G3 - 31D6 | A | 302 | 826 |
| ODY-31G3 - 31D6 | A | 303 | 827 |
| ODY-31G3 - 31D6 | A | 304 | 828 |
| ODY-31G3 - 31D6 | A | 305 | 829 |
| ODY-31G3 - 31D6 | A | 306 | 826 |
| ODY-31G3 - 31D6 | A | 307 | 830 |
| ODY-31G3 - 31D6 | A | 308 | 831 |
| ODY-31G3 - 31D6 | A | 309 | 832 |
| ODY-31G3 - 31D6 | A | 310 | 833 |
| ODY-31G3 - 31D6 | A | 311 | 834 |
| ODY-31G3 - 31D6 | A | 312 | 835 |
| ODY-31G3 - 31D6 | A | 313 | 836 |
| ODY-31G3 - 31D6 | A | 314 | 837 |
| ODY-31G3 - 31D6 | A | 315 | 838 |
| ODY-31G3 - 31D6 | A | 316 | 839 |
| ODY-31G3 - 31D6 | A | 317 | 840 |
| ODY-31G3 - 31D6 | A | 318 | 841 |
| ODY-31G3 - 31D6 | A | 319 | 842 |
| ODY-31G3 - 31D6 | A | 320 | 843 |
| ODY-31G3 - 31D6 | A | 321 | 844 |
| ODY-31G3 - 31D6 | A | 322 | 845 |
| ODY-31G3 - 31D6 | A | 323 | 846 |
| ODY-31G3 - 31D6 | A | 324 | 847 |
| ODY-31G3 - 31D6 | A | 325 | 848 |
| ODY-31G3 - 31D6 | A | 326 | 849 |
| ODY-31G3 - 31D6 | A | 327 | 850 |
| ODY-31G3 - 31D6 | A | 328 | 851 |
| ODY-31G3 - 31D6 | A | 329 | 835 |
| ODY-31G3 - 31D6 | A | 330 | 852 |
| ODY-31G3 - 31D6 | A | 331 | 853 |
| ODY-31G3 - 31D6 | A | 332 | 854 |
| ODY-31G3 - 31D6 | A | 333 | 855 |
| ODY-31G3 - 31D6 | A | 334 | 856 |
| ODY-31G3 - 31D6 | A | 335 | 857 |
| ODY-31G3 - 31D6 | A | 336 | 858 |
| ODY-31G3 - 31D6 | A | 337 | 859 |
| ODY-31G3 - 31D6 | A | 338 | 860 |
| ODY-31G3 - 31D6 | A | 339 | 861 |
| ODY-31G3 - 31D6 | A | 340 | 862 |
| ODY-31G3 - 31D6 | A | 341 | 863 |
| ODY-31G3 - 31D6 | A | 342 | 864 |
| ODY-31G3 - 31D6 | A | 343 | 865 |
| ODY-31G3 - 31D6 | A | 344 | 366 |
| ODY-31G3 - 31D6 | A | 345 | 867 |
| ODY-31G3 - 31D6 | A | 346 | 868 |
| ODY-31G3 - 31D6 | A | 347 | 869 |
| ODY-31G3 - 31D6 | A | 348 | 870 |
| ODY-31G3 - 31D6 | A | 349 | 871 |
| ODY-31G3 - 31D6 | A | 350 | 872 |
| ODY-31G3 - 31D6 | A | 351 | 873 |
| ODY-31G3 - 31D6 | A | 352 | 874 |
| ODY-31G3 - 31D6 | A | 353 | 875 |
| ODY-31G3 - 31D6 | A | 354 | 876 |
| ODY-31G3 - 31D6 | A | 355 | 877 |
| ODY-31G3 - 31D6 | A | 356 | 878 |
| ODY-31G3 - 31D6 | A | 357 | 879 |
| ODY-31G3 - 31D6 | A | 358 | 880 |
| ODY-31G3 - 31D6 | A | 359 | 881 |
| ODY-31G3 - 31D6 | A | 360 | 882 |
| ODY-31G3 - 31D6 | A | 361 | 883 |
| ODY-31G3 - 31D6 | A | 362 | 884 |
| ODY-31G3 - 31D6 | A | 363 | 885 |
| ODY-31G3 - 31D6 | A | 364 | 886 |
| ODY-31G3 - 31D6 | A | 365 | 887 |
| ODY-31G3 - 31D6 | A | 366 | 888 |
| ODY-31G3 - 31D6 | A | 367 | 889 |
| ODY-31G3 - 31D6 | A | 368 | 890 |
| ODY-31G3 - 31D6 | A | 369 | 891 |
| ODY-31G3 - 31D6 | A | 370 | 892 |
| ODY-31G3 - 31D6 | A | 371 | 893 |
| ODY-31G3 - 31D6 | A | 372 | 894 |
| ODY-31G3 - 31D6 | A | 373 | 895 |
| ODY-31G3 - 31D6 | A | 374 | 896 |
| ODY-31G3 - 31D6 | A | 375 | 897 |
| ODY-31G3 - 31D6 | A | 376 | 898 |
| ODY-31G3 - 31D6 | A | 377 | 899 |
| ODY-31G3 - 31D6 | A | 378 | 900 |
| ODY-31G3 - 31D6 | A | 379 | 901 |
| ODY-31G3 - 31D6 | A | 380 | 902 |
| ODY-31G3 - 31D6 | A | 381 | 903 |
| ODY-31G3 - 31D6 | A | 382 | 904 |
| ODY-31G3 - 31D6 | A | 383 | 905 |
| ODY-31G3 - 31D6 | A | 384 | 906 |
| ODY-31G3 - 31D6 | A | 385 | 907 |
| ODY-31G3 - 31D6 | A | 386 | 908 |
| ODY-31G3 - 31D6 | A | 387 | 909 |
| ODY-31G3 - 31D6 | A | 388 | 910 |
| ODY-31G3 - 31D6 | A | 389 | 911 |
| ODY-31G3 - 31D6 | A | 390 | 912 |
| ODY-31G3 - 31D6 | A | 391 | 913 |
| ODY-37C7 | B | 11 | 83 |
| ODY-37C7 | B | 392 | 914 |
| ODY-37C7 | B | 393 | 915 |
| ODY-37C7 | B | 394 | 916 |
| ODY-37C7 | B | 395 | 917 |
| ODY-37C7 | B | 396 | 918 |
| ODY-37C7 | B | 397 | 919 |
| ODY-37C7 | B | 398 | 920 |
| ODY-37C7 | B | 399 | 921 |
| ODY-37C7 | B | 400 | 922 |
| ODY-31G11 | C | 401 | 923 |
| ODY-31G11 | C | 402 | 924 |
| ODY-31G11 | C | 15 | 84 |
| ODY-31G11 | C | 403 | 925 |
| ODY-31G11 | C | 404 | 923 |
| ODY-31G11 | C | 405 | 926 |
| ODY-31G11 | C | 406 | 927 |
| ODY-31G11 | C | 407 | 923 |
| ODY-31G11 | C | 408 | 928 |
| ODY-31G11 | C | 409 | 929 |
| ODY-31G11 | C | 410 | 930 |
| ODY-33D4 | D | 411 | 931 |
| ODY-33D4 | D | 412 | 932 |
| ODY-33D4 | D | 413 | 933 |
| ODY-33D4 | D | 414 | 934 |
| ODY-33D4 | D | 415 | 935 |
| ODY-33D4 | D | 416 | 936 |
| ODY-33D4 | D | 417 | 937 |
| ODY-33D4 | D | 418 | 938 |
| ODY-33D4 | D | 419 | 939 |
| ODY-33D4 | D | 420 | 940 |
| ODY-33D4 | D | 421 | 941 |
| ODY-33D4 | D | 422 | 942 |
| ODY-33D4 | D | 423 | 943 |
| ODY-33D4 | D | 424 | 944 |
| ODY-33D4 | D | 425 | 945 |
| ODY-33D4 | D | 426 | 946 |
| ODY-33D4 | D | 427 | 947 |
| ODY-33D4 | D | 428 | 948 |
| ODY-33D4 | D | 429 | 949 |
| ODY-33D4 | D | 430 | 950 |
| ODY-33D4 | D | 431 | 951 |
| ODY-33D4 | D | 432 | 952 |
| ODY-33D4 | D | 433 | 953 |
| ODY-33D4 | D | 434 | 954 |
| ODY-33D4 | D | 435 | 955 |
| ODY-33D4 | D | 436 | 956 |
| ODY-33D4 | D | 437 | 957 |
| ODY-33D4 | D | 19 | 85 |
| ODY-33D4 | D | 438 | 958 |
| ODY-33D4 | D | 439 | 959 |
| ODY-33D4 | D | 440 | 960 |
| ODY-33D4 | D | 441 | 961 |
| ODY-33D4 | D | 442 | 962 |
| ODY-33D4 | D | 443 | 963 |
| ODY-33D4 | D | 444 | 964 |
| ODY-33D4 | D | 445 | 965 |
| ODY-33D4 | D | 446 | 966 |
| ODY-33D4 | D | 447 | 967 |
| ODY-33D4 | D | 448 | 968 |
| ODY-33D4 | D | 449 | 969 |
| ODY-33D4 | D | 450 | 970 |
| ODY-33D4 | D | 451 | 971 |
| ODY-33D4 | D | 452 | 972 |
| ODY-33D4 | D | 453 | 973 |
| ODY-33D4 | D | 454 | 938 |
| ODY-33D4 | D | 455 | 944 |
| ODY-33D4 | D | 456 | 974 |
| ODY-33D4 | D | 457 | 975 |
| ODY-33D4 | D | 458 | 956 |
| ODY-33D4 | D | 459 | 976 |
| ODY-33D4 | D | 460 | 977 |
| ODY-33D4 | D | 461 | 978 |
| ODY-33D4 | D | 462 | 979 |
| ODY-33D4 | D | 463 | 980 |
| ODY-33D4 | D | 464 | 981 |
| ODY-33D4 | D | 465 | 982 |
| ODY-33D4 | D | 466 | 983 |
| ODY-33D4 | D | 467 | 984 |
| ODY-33D4 | D | 468 | 985 |
| ODY-33D4 | D | 469 | 986 |
| ODY-33D4 | D | 470 | 987 |
| ODY-33D4 | D | 471 | 988 |
| ODY-33D4 | D | 472 | 989 |
| ODY-33D4 | D | 473 | 951 |
| ODY-33D4 | D | 474 | 990 |
| ODY-33D4 | D | 475 | 991 |
| ODY-33D4 | D | 476 | 992 |
| ODY-33D4 | D | 477 | 954 |
| ODY-33D4 | D | 478 | 993 |
| ODY-33D4 | D | 479 | 994 |
| ODY-33D4 | D | 480 | 939 |
| ODY-33D4 | D | 481 | 995 |
| ODY-33D4 | D | 482 | 996 |
| ODY-33D4 | D | 483 | 997 |
| ODY-33D4 | D | 484 | 998 |
| ODY-33D4 | D | 485 | 999 |
| ODY-33D4 | D | 486 | 1000 |
| ODY-33D4 | D | 487 | 1001 |
| ODY-33D4 | D | 488 | 1002 |
| ODY-N1277 | G | 23 | 86 |
| ODY-N1277 | G | 489 | 1003 |
| ODY-N1277 | G | 490 | 1004 |
| ODY-N1364 - N1365 | J | 31 | 88 |
| ODY-N1364 - N1365 | J | 491 | 1005 |
| ODY-N1364 - N1365 | J | 492 | 1006 |
| ODY-N1364 - N1365 | J | 493 | 1007 |
| ODY-N1364 - N1365 | J | 494 | 1008 |
| ODY-N1364 - N1365 | J | 495 | 1009 |
| ODY-N1364 - N1365 | J | 496 | 1010 |
| ODY-N1364 - N1365 | J | 497 | 1011 |
| ODY-N1364 - N1365 | J | 498 | 1012 |
| ODY-N1364 - N1365 | J | 499 | 1013 |
| ODY-N1364 - N1365 | J | 500 | 1014 |
| ODY-N1364 - N1365 | J | 501 | 88 |
| ODY-N1364 - N1365 | J | 502 | 1015 |
| ODY-N1364 - N1365 | J | 503 | 1016 |
| ODY-N1364 - N1365 | J | 504 | 1017 |
| ODY-N1364 - N1365 | J | 505 | 1018 |
| ODY-N1364 - N1365 | J | 506 | 1019 |
| ODY-N1364 - N1365 | J | 507 | 1020 |
| ODY-N1364 - N1365 | J | 508 | 1019 |
| ODY-N1364 - N1365 | J | 509 | 1021 |
| ODY-N1364 - N1365 | J | 510 | 1022 |
| ODY-N1364 - N1365 | J | 511 | 1023 |
| ODY-N1364 - N1365 | J | 512 | 1024 |
| ODY-N1364 - N1365 | J | 513 | 1025 |
| ODY-N1364 - N1365 | J | 514 | 1026 |
| ODY-N1364 - N1365 | J | 515 | 1027 |
| ODY-N1364 - N1365 | J | 516 | 1028 |
| ODY-N1364 - N1365 | J | 517 | 1029 |
| ODY-N1364 - N1365 | J | 518 | 1030 |
| ODY-N1364 - N1365 | J | 519 | 1031 |
| ODY-N1364 - N1365 | J | 520 | 1032 |
| ODY-N1364 - N1365 | J | 521 | 1033 |
| ODY-N1364 - N1365 | J | 27 | 87 |
| ODY-N1364 - N1365 | J | 522 | 1034 |
| ODY-N1364 - N1365 | J | 523 | 1035 |
| ODY-N1364 - N1365 | J | 524 | 1036 |
| ODY-N1364 - N1365 | J | 525 | 1037 |
| ODY-N1364 - N1365 | J | 526 | 1038 |
| ODY-N1364 - N1365 | J | 527 | 1039 |
| ODY-N1364 - N1365 | J | 528 | 1040 |
| ODY-N1364 - N1365 | J | 529 | 1041 |
| ODY-N1364 - N1365 | J | 530 | 1042 |
| ODY-N1364 - N1365 | J | 531 | 1043 |
| ODY-N1364 - N1365 | J | 532 | 1044 |
| ODY-N1364 - N1365 | J | 533 | 1045 |
| ODY-N1364 - N1365 | J | 534 | 1046 |
| ODY-N1364 - N1365 | J | 535 | 1035 |
| ODY-N1364 - N1365 | J | 536 | 1035 |
| ODY-N1364 - N1365 | J | 537 | 1047 |
| ODY-N1364 - N1365 | J | 538 | 1048 |
| ODY-35A10 - N1402 | K | 539 | 1049 |
| ODY-35A10 - N1402 | K | 540 | 1050 |
| ODY-35A10 - N1402 | K | 541 | 1051 |
| ODY-35A10 - N1402 | K | 542 | 1051 |
| ODY-35A10 - N1402 | K | 543 | 1050 |
| ODY-35A10 - N1402 | K | 544 | 1052 |
| ODY-35A10 - N1402 | K | 545 | 1053 |
| ODY-35A10 - N1402 | K | 546 | 1054 |
| ODY-35A10 - N1402 | K | 547 | 1055 |
| ODY-35A10 - N1402 | K | 548 | 1051 |
| ODY-35A10 - N1402 | K | 549 | 1056 |
| ODY-35A10 - N1402 | K | 550 | 1057 |
| ODY-35A10 - N1402 | K | 551 | 1058 |
| ODY-35A10 - N1402 | K | 552 | 1059 |
| ODY-35A10 - N1402 | K | 553 | 1060 |
| ODY-35A10 - N1402 | K | 554 | 1061 |
| ODY-35A10 - N1402 | K | 555 | 1062 |
| ODY-35A10 - N1402 | K | 556 | 1063 |
| ODY-35A10 - N1402 | K | 557 | 1064 |
| ODY-35A10 - N1402 | K | 558 | 1065 |
| ODY-35A10 - N1402 | K | 559 | 1066 |
| ODY-35A10 - N1402 | K | 39 | 90 |
| ODY-35A10 - N1402 | K | 560 | 1067 |
| ODY-35A10 - N1402 | K | 561 | 1068 |
| ODY-35A10 - N1402 | K | 562 | 1069 |
| ODY-35A10 - N1402 | K | 563 | 1070 |
| ODY-35A10 - N1402 - | K | 4101 | 4148 |
| N1400 | | | |
| ODY-35A10 - N1402 - | K | 4102 | 4149 |
| N1400 | | | |
| ODY-35A10 - N1402 - | K | 4103 | 4150 |
| N1400 | | | |
| ODY-35A10 - N1402 - | K | 4104 | 4151 |
| N1400 | | | |
| ODY-35A10 - N1402 - | K | 4105 | 4152 |
| N1400 | | | |
| ODY-35A10 - N1402 - | K | 4106 | 4153 |
| N1400 | | | |
| ODY-35A10 - N1402 - | K | 4107 | 4154 |
| N1400 | | | |
| ODY-35A10 - N1402 - | K | 4108 | 4155 |
| N1400 | | | |
| ODY-35A10 - N1402 - | K | 4109 | 4156 |
| N1400 | | | |
| ODY-35A10 - N1402 - | K | 4110 | 4157 |
| N1400 | | | |
| ODY-35A10 - N1402 - | K | 4111 | 4158 |
| N1400 | | | |
| ODY-35A10 - N1402 - | K | 4112 | 4159 |
| N1400 | | | |
| ODY-35A10 - N1402 - | K | 4113 | 4160 |
| N1400 | | | |
| ODY-35A10 - N1402 - | K | 4114 | 4161 |
| N1400 | | | |
| ODY-35A10 - N1402 - | K | 4115 | 4162 |
| N1400 | | | |
| ODY-35A10 - N1402 - | K | 4116 | 4163 |
| N1400 | | | |
| ODY-35A10 - N1402 - | K | 4117 | 4164 |
| N1400 | | | |
| ODY-35A10 - N1402 - | K | 4118 | 4165 |
| N1400 | | | |
| ODY-35A10 - N1402 - | K | 4119 | 4166 |
| N1400 | | | |
| ODY-35A10 - N1402 - | K | 4120 | 4167 |
| N1400 | | | |
| ODY-35A10 - N1402 - | K | 4121 | 4168 |
| N1400 | | | |
| ODY-35A10 - N1402 - | K | 4122 | 4169 |
| N1400 | | | |
| ODY-35A10 - N1402 - | K | 4123 | 4170 |
| N1400 | | | |
| ODY-35A10 - N1402 - | K | 4124 | 4171 |
| N1400 | | | |
| ODY-35A10 - N1402 - | K | 4125 | 4172 |
| N1400 | | | |
| ODY-N1425 | L | 43 | 91 |
| ODY-N1409 | M | 47 | 92 |
| ODY-N1409 | M | 564 | 1071 |
| ODY-N1409 | M | 565 | 1072 |
| ODY-N1409 | M | 566 | 1072 |
| ODY-N1409 | M | 567 | 1073 |
| ODY-N1409 | M | 568 | 1074 |
| ODY-N1409 | M | 569 | 1074 |
| ODY-N1409 | M | 570 | 1075 |
| ODY-N1409 | M | 571 | 1076 |
| ODY-N1409 | M | 572 | 1077 |
| ODY-N1409 | M | 573 | 1078 |
| ODY-N1409 | M | 574 | 1079 |
| ODY-N1409 | M | 575 | 1073 |
| ODY-N1409 | M | 576 | 1080 |
| ODY-N1409 | M | 577 | 1081 |
| ODY-N1409 | M | 578 | 1082 |
| ODY-N1409 | M | 579 | 1083 |
| ODY-N1409 | M | 580 | 1084 |
| ODY-N1409 | M | 581 | 1074 |
| ODY-N1409 | M | 582 | 1085 |
| ODY-N1409 | M | 583 | 1074 |
| ODY-N1409 | M | 584 | 1078 |
| ODY-N1409 | M | 585 | 1086 |
| ODY-N1409 | M | 586 | 1071 |
| ODY-N1409 | M | 587 | 1087 |
| ODY-N1409 | M | 588 | 1073 |
| ODY-N1409 | M | 589 | 1088 |
| ODY-N1409 | M | 590 | 1073 |
| ODY-N1409 | M | 591 | 1078 |
| ODY-N1409 | M | 592 | 1089 |
| ODY-N1409 | M | 593 | 1077 |
| ODY-N1409 | M | 594 | 1090 |
| ODY-N1409 | M | 595 | 1091 |
| ODY-N1409 | M | 596 | 1092 |
| ODY-N1409 | M | 597 | 1093 |
| ODY-N1409 | M | 598 | 1094 |
| ODY-N1409 | M | 599 | 1095 |
| ODY-N1409 | M | 600 | 1096 |
| ODY-N1409 | M | 601 | 1097 |
| ODY-N1409 | M | 602 | 1098 |
| ODY-N1409 | M | 603 | 1099 |
| ODY-N1409 | M | 604 | 1100 |
| ODY-N1409 | M | 605 | 1101 |
| ODY-N1409 | M | 606 | 1102 |
| ODY-N1409 | M | 607 | 1103 |
| ODY-N1409 | M | 608 | 1103 |
| ODY-N1409 | M | 609 | 1103 |
| ODY-N1409 | M | 610 | 1104 |
| ODY-N1409 | M | 611 | 1104 |
| ODY-N1409 | M | 612 | 1105 |
| ODY-N1409 | M | 613 | 1106 |
| ODY-N1409 | M | 614 | 1107 |
| ODY-N1409 | M | 615 | 1108 |
| ODY-N1409 | M | 616 | 1109 |
| ODY-N1409 | M | 617 | 1110 |
| ODY-N1409 | M | 618 | 1111 |
| ODY-N1409 | M | 619 | 1112 |
| ODY-N1409 | M | 620 | 1113 |
| ODY-N1409 | M | 621 | 1114 |
| ODY-N1409 | M | 622 | 1115 |
| ODY-N1409 | M | 623 | 1116 |
| ODY-N1409 | M | 624 | 1099 |
| ODY-N1409 | M | 625 | 1117 |
| ODY-N1409 | M | 626 | 1118 |
| ODY-N1409 | M | 627 | 1119 |
| ODY-N1409 | M | 628 | 1120 |
| ODY-N1409 | M | 629 | 1101 |
| ODY-N1409 | M | 630 | 1099 |
| ODY-N1409 | M | 631 | 1102 |
| ODY-N1409 | M | 632 | 1102 |
| ODY-N1409 | M | 633 | 1106 |
| ODY-N1409 | M | 634 | 1121 |
| ODY-N1409 | M | 635 | 1122 |
| ODY-N1409 | M | 636 | 1123 |
| ODY-N1409 | M | 637 | 1124 |
| ODY-N1409 | M | 638 | 1125 |
| ODY-N1409 | M | 639 | 1126 |
| ODY-N1409 | M | 640 | 1127 |
| ODY-N1323 | N | 4079 | 4126 |
| ODY-N1323 | N | 4080 | 4127 |
| ODY-N1323 | N | 4081 | 4128 |
| ODY-N1323 | N | 4082 | 4129 |
| ODY-N1323 | N | 4083 | 4130 |
| ODY-N1323 | N | 4084 | 4131 |
| ODY-N1323 | N | 4085 | 4132 |
| ODY-N1323 | N | 4086 | 4133 |
| ODY-N1323 | N | 4087 | 4134 |
| ODY-33B1 | O | 4088 | 4135 |
| ODY-33B1 | O | 4089 | 4136 |
| ODY-33B1 | O | 4090 | 4137 |
| ODY-33B1 | O | 4091 | 4138 |
| ODY-33B1 | O | 4092 | 4139 |
| ODY-33B1 | O | 4093 | 4140 |
| ODY-33B1 | O | 4094 | 4141 |
| ODY-33B1 | O | 4095 | 4142 |
| ODY-33B1 | O | 4096 | 4143 |
| ODY-33B1 | O | 4097 | 4144 |
| ODY-33B1 | O | 4098 | 4145 |
| ODY-33B1 | O | 4099 | 4146 |
| ODY-33B1 | O | 4100 | 4147 |

[0229] In some embodiments, an anti-TNFR2 antigen-binding protein (e.g., antibody such as a single-domain antibody) of the present disclosure comprises a complementarity determining region 1 (CDR1) comprising an amino acid sequence selected from (amino acids listed in a pair of brackets represent the possible amino acids at the particular position)

a).
(SEQ ID NO: 68)
GSI(V/F)(R/S)(T/A)(N/D)(S/G/A);
b).
(SEQ ID NO: 69)
GFT(F/L)DD(I/Y)A;
c).
(SEQ ID NO: 70)
GFTFS(S/R/G)YA;
d).
(SEQ ID NO: 16)
GRTFSDYG;
e).
(SEQ ID NO: 71)
G(L/F)TLDYYA;
f).
(SEQ ID NO: 72)
GF(T/N)FSMYS;
g).
(SEQ ID NO: 73)
GRTF(G/R/S)(N/S)(Y/L)(T/F);
h).
(SEQ ID NO: 40)
GASLSRNA;
i).
(SEQ ID NO: 74)
GS(I/T)FRFPP;
j).
(SEQ ID NO: 4061)
GFTLDDYA;
and
k).
(SEQ ID NO: 4519)
G(F/V)(S/T)LD(D/Y)(H/Y)T.

[0230] In some embodiments, an anti-TNFR2 antigen-binding protein (e.g., antibody such as a single-domain antibody) of the present disclosure comprises a complementarity determining region 2 (CDR2) comprising an amino acid sequence selected from (amino acids listed in a pair of brackets represent the possible amino acids at the particular position)

a).
(SEQ ID NO: 75)
IRSDGF(T/I);
b).
(SEQ ID NO: 76)
I(Y/F)SY(S/G)(S/P)NT;
c).
(SEQ ID NO: 77)
I(Y/S)(S/D)DGS(E/D)T;
d).
(SEQ ID NO: 4699)
INWSN(G/A)RT;
e).
(SEQ ID NO: 78)
I(S/N)(V/T)(S/G)DGST;
f).
(SEQ ID NO: 79)
IDT(R/G)GST;
g).
(SEQ ID NO: 80)
IR(W/R/Y)(T/P)G(G/L)(S/I)T;
h).
(SEQ ID NO: 41)
IYDDGET;
i).
(SEQ ID NO: 45)
LTSGGST;
j).
(SEQ ID NO: 4062)
IFSYSSNT;
and
k).
(SEQ ID NO: 4518)
I(N/S)SNDG(S/T)(T/V).

[0231] In some embodiments, an anti-TNFR2 antigen-binding protein (e.g., antibody such as a single-domain antibody) of the present disclosure comprises a complementarity determining region 3 (CDR3) comprising an amino acid sequence selected from (amino acids listed in a pair of brackets represent the possible amino acids at the particular position)

a).
(SEQ ID NO: 60)
(Y/F)YQ(S/A)LS(T/S)(P/A)N(Y/F)GQ(V/T)F;
b).
(SEQ ID NO: 61)
AADSDL(S/R)TV(V/T)VGPHDY;
c).
(SEQ ID NO: 62)
AKDAG(S/G)WG(T/R)GPFG(Y/F)(E/D)YDY;
d).
(SEQ ID NO: 63)
AA(T/A)PSGKAY(T/S)Y;
e).
(SEQ ID NO: 64)
ATPGPY(T/S/M)YCAPYGSSWSRGYDY;
f).
(SEQ ID NO: 65)
ARV(R/G)G(T/S/A)PY(E/D)Y(N/G)Y;
g).
(SEQ ID NO: 66)
(T/A/V)A(S/A)PTGRAF(T/N/A)Y;
h).
(SEQ ID NO: 42)
AGSAFDF;
i).
(SEQ ID NO: 67)
S(V/M)(V/L)GRDM(M/V)TY;
j).
(SEQ ID NO: 4063)
AVGDFEGELVLKGDY;
k).
(SEQ ID NO: 4517)
AAD(L/V)G(F/V/Y)LY(A/T/V)DYV(P/R)LH(M/T)HHFGS;
l).
(SEQ ID NO: 4771)
A(A/G)(T/A)(P/L)(S/T)GKAY(T/S)Y.

[0232] In certain embodiments, an anti-TNFR2 antigen-binding protein (e.g., antibody such as a single-domain antibody) of the present disclosure comprises
[0233] i) a CDR1 comprising an amino acid sequence of SEQ ID NO: 68, a CDR2 comprising an amino acid sequence of SEQ ID NO: 75, and a CDR3 comprising an amino acid sequence of SEQ ID NO: 60;
[0234] ii) a CDR1 comprising an amino acid sequence of SEQ ID NO: 69, a CDR2 comprising an amino acid sequence of SEQ ID NO: 76, a CDR3 comprising an amino acid sequence of SEQ ID NO: 61;
[0235] iii) a CDR1 comprising an amino acid sequence of SEQ ID NO: 70, a CDR2 comprising an amino acid sequence of SEQ ID NO: 77, a CDR3 comprising an amino acid sequence of SEQ ID NO: 62;
[0236] iv) a CDR1 comprising an amino acid sequence of SEQ ID NO: 16, a CDR2 comprising an amino acid sequence of SEQ ID NO: 4699, a CDR3 comprising an amino acid sequence of SEQ ID NO: 63;
[0237] v) a CDR1 comprising an amino acid sequence of SEQ ID NO: 71, a CDR2 comprising an amino acid sequence of SEQ ID NO: 78, a CDR3 comprising an amino acid sequence of SEQ ID NO: 64;
[0238] vi) a CDR1 comprising an amino acid sequence of SEQ ID NO: 72, a CDR2 comprising an amino acid sequence of SEQ ID NO: 79, a CDR3 comprising an amino acid sequence of SEQ ID NO: 65;
[0239] vii) a CDR1 comprising an amino acid sequence of SEQ ID NO: 73, a CDR2 comprising an amino acid sequence of SEQ ID NO: 80, a CDR3 comprising an amino acid sequence of SEQ ID NO: 66;
[0240] viii) a CDR1 comprising an amino acid sequence of SEQ ID NO: 40, a CDR2 comprising an amino acid sequence of SEQ ID NO: 41, a CDR3 comprising an amino acid sequence of SEQ ID NO: 42; or
[0241] ix) a CDR1 comprising an amino acid sequence of SEQ ID NO: 74, a CDR2 comprising an amino acid sequence of SEQ ID NO: 45, a CDR3 comprising an amino acid sequence of SEQ ID NO: 67;
[0242] x) a CDR1 comprising an amino acid sequence of SEQ ID NO: 4061, a CDR2 comprising an amino acid sequence of SEQ ID NO: 4062, a CDR3 comprising an amino acid sequence of SEQ ID NO: 4063;
[0243] xi). a CDR1 comprising an amino acid sequence of SEQ ID NO: 4519, a CDR2 comprising an amino acid sequence of SEQ ID NO: 4518, a CDR3 comprising an amino acid sequence of SEQ ID NO: 4517; or
[0244] xii). a CDR1 comprising an amino acid sequence of SEQ ID NO: 16, a CDR2 comprising an amino acid sequence of SEQ ID NO: 4699, a CDR3 comprising an amino acid sequence of SEQ ID NO: 4771.

[0245] In certain embodiments, an anti-TNFR2 antigen-binding protein (e.g., antibody such as a single-domain antibody) of the present disclosure comprises
[0246] a) a CDR1 comprising an amino acid sequence of SEQ ID NO: 69, a CDR2 comprising an amino acid sequence of SEQ ID NO: 76, a CDR3 comprising an amino acid sequence of SEQ ID NO: 61;
[0247] b) a CDR1 comprising an amino acid sequence of SEQ ID NO: 16, a CDR2 comprising an amino acid sequence of SEQ ID NO: 4699, a CDR3 comprising an amino acid sequence of SEQ ID NO: 63;
[0248] c) a CDR1 comprising an amino acid sequence of SEQ ID NO: 73, a CDR2 comprising an amino acid sequence of SEQ ID NO: 80, a CDR3 comprising an amino acid sequence of SEQ ID NO: 66; or
[0249] d) a CDR1 comprising an amino acid sequence of SEQ ID NO: 16, a CDR2 comprising an amino acid sequence of SEQ ID NO: 4699, a CDR3 comprising an amino acid sequence of SEQ ID NO: 4771.

[0250] In certain embodiments, an anti-TNFR2 antigen-binding protein (e.g., antibody such as a single-domain antibody) of the present disclosure comprises
[0251] i) a CDR1 with an amino acid sequence of GSI(V/F)(R/S)(A/T)(N/D)(G/A) (SEQ ID NO: 4700), a CDR2 comprising an amino acid sequence of IRSDGFT (SEQ ID NO: 2), and a CDR3 comprising an amino acid sequence of YYQ(S/A)LSSPNYGQ(V/T)F (SEQ ID NO: 4701);
[0252] ii) a CDR1 with an amino acid sequence of GFTFDDIA (SEQ ID NO: 8), a CDR2 comprising an amino acid sequence of IYSYGPNT (SEQ ID NO: 9), and a CDR3 comprising an amino acid sequence of AADSDLSTVV(V/T)GPHDY (SEQ ID NO: 4702);
[0253] iii) a CDR1 with an amino acid sequence of GFTFSRYA (SEQ ID NO: 12), a CDR2 comprising an amino acid sequence of ISDDGSDT (SEQ ID NO: 13), and a CDR3 comprising an amino acid sequence of AKDAGSWGTGPFGYEYDY (SEQ ID NO: 14);
[0254] iv) a CDR1 with an amino acid sequence of GRTFSDYG (SEQ ID NO: 16), a CDR2 comprising an amino acid sequence of INWSN(G/A)RT (SEQ ID NO: 4699), and a CDR3 comprising an amino acid sequence of AA(T/A)PSGKAYSY (SEQ ID NO: 4703);
[0255] v) a CDR1 with an amino acid sequence of GLTLDYYA (SEQ ID NO: 20), a CDR2 comprising an amino acid sequence of ISTSDGST (SEQ ID NO: 21), and a CDR3 comprising an amino acid sequence of ATPGPYTYCAPYGSSWSRGYDY (SEQ ID NO: 22);
[0256] vi) a CDR1 with an amino acid sequence of GF(T/N)FSMYS (SEQ ID NO: 72), a CDR2 comprising an amino acid sequence of IDT(R/G)GST (SEQ ID NO: 79), and a CDR3 comprising an amino acid sequence of ARV(G/R)G(T/A)PYEY(N/G)Y (SEQ ID NO: 4704);
[0257] vii) a CDR1 with an amino acid sequence of GRTF(G/S)S(Y/L)(T/F) (SEQ ID NO: 4705), a CDR2 comprising an amino acid sequence of IR(W/R/Y)(T/P)G(G/L)(S/I)T (SEQ ID NO: 80), and a CDR3 comprising an amino acid sequence of (A/V)A(A/S)PTGRAF(T/N)Y (SEQ ID NO: 4707);
[0258] viii) a CDR1 with an amino acid sequence of GASLSRNA (SEQ ID NO: 40), a CDR2 comprising an amino acid sequence of IYDDGET (SEQ ID NO: 41), and a CDR3 comprising an amino acid sequence of AGSAFDF (SEQ ID NO: 42);
[0259] ix) a CDR1 with an amino acid sequence of GS(T/I)FRFPP (SEQ ID NO: 4708), a CDR2 comprising an amino acid sequence of LTSGGST (SEQ ID NO: 45), and a CDR3 comprising an amino acid sequence of SVLGRDM(M/V)TY (SEQ ID NO: 4706);
[0260] x) a CDR1 with an amino acid sequence of GFTLDDYA (SEQ ID NO: 4061), a CDR2 comprising an amino acid sequence of IFSYSSNT (SEQ ID NO: 4062), and a CDR3 comprising an amino acid sequence of AVGDFEGELVLKGDY (SEQ ID NO: 4063);
[0261] xi) a CDR1 with an amino acid sequence of GFTLDYYT (SEQ ID NO: 4065), a CDR2 comprising an amino acid sequence of ISSNDGSV (SEQ ID NO: 4066), and a CDR3 comprising an amino acid sequence of AADLGYLYVDYVRLHTHHFGS (SEQ ID NO: 4067);
[0262] xii). a CDR1 with an amino acid sequence of GRTFSDYG (SEQ ID NO: 4719), a CDR2 comprising an amino acid sequence of INWSNGRT (SEQ ID NO: 4723), and a CDR3 comprising an amino acid sequence of AATPTGKAYTY (SEQ ID NO: 4727);
[0263] xiii). a CDR1 with an amino acid sequence of GRTFSDYG (SEQ ID NO: 4720), a CDR2 comprising an amino acid sequence of INWSNGRT (SEQ ID NO: 4724), and a CDR3 comprising an amino acid sequence of AATPTGKAYTY (SEQ ID NO: 4728);
[0264] xiv). a CDR1 with an amino acid sequence of GRTFSDYG (SEQ ID NO: 4721), a CDR2 comprising an amino acid sequence of INWSNGRT (SEQ ID NO: 4725), and a CDR3 comprising an amino acid sequence of AGTLSGKAYTY (SEQ ID NO: 4729); or
[0265] xv). a CDR1 with an amino acid sequence of GRTFSDYG (SEQ ID NO: 4722), a CDR2 comprising an amino acid sequence of INWSNGRT (SEQ ID NO: 4726), and a CDR3 comprising an amino acid sequence of AGTLSGKAYTY (SEQ ID NO: 4730).

[0266] In certain embodiments, an anti-TNFR2 antigen-binding protein (e.g., antibody such as a single-domain antibody) of the present disclosure comprises
[0267] a) a CDR1 with an amino acid sequence of GFTFDDIA (SEQ ID NO: 8), a CDR2 comprising an amino acid sequence of IYSYGPNT (SEQ ID NO: 9), and a CDR3 comprising an amino acid sequence of AADSDLSTVV(V/T)GPHDY (SEQ ID NO: 4702);
[0268] b) a CDR1 with an amino acid sequence of GRTFSDYG (SEQ ID NO: 16), a CDR2 comprising an amino acid sequence of INWSN(G/A)RT (SEQ ID NO: 4699), and a CDR3 comprising an amino acid sequence of AA(T/A)PSGKAYSY (SEQ ID NO: 4703);
[0269] c) a CDR1 with an amino acid sequence of GRTF(G/S)S(Y/L)(T/F) (SEQ ID NO: 4705), a CDR2 comprising an amino acid sequence of IR(W/R/Y)(T/P)G(G/L)(S/I)T (SEQ ID NO: 80), and a CDR3 comprising an amino acid sequence of (A/V)A(A/S)PTGRAF(T/N)Y (SEQ ID NO: 4707); or
[0270] d). a CDR1 comprising an amino acid sequence of SEQ ID NO: 16, a CDR2 comprising an amino acid sequence of SEQ ID NO: 4699, a CDR3 comprising an amino acid sequence of SEQ ID NO: 4771.

[0271] Provided herein are anti-TNFR2 antigen-binding proteins (e.g., antibodies such as single-domain antibodies) comprising a CDR1 (CDR1) comprising an amino acid sequence selected from any of the CDR1 amino acid sequences listed in Table 1-1 or Table 5, or a similar sequence thereof having at least 70%, at least 80%, at least 90%, or at least 95% sequence identity.

[0272] In some embodiments, an anti-TNFR2 antigen-binding protein (e.g., antibody such as single-domain antibody) comprises a CDR1 comprising an amino acid sequence selected from SEQ ID NOs: 1, 5, 8, 12, 16, 20, 24, 28, 32, 36, 40, 44, 4061, 4065, 4069, 4520, 4719-4722, 1128-1686, 4173-4234, and 4533-4556, or a similar sequence thereof having at least 70%, at least 80%, at least 90%, or at least 95% sequence identity.

[0273] Provided herein are anti-TNFR2 antigen-binding proteins (e.g., antibodies such as single-domain antibodies) comprising a CDR2 (CDR2) comprising an amino acid sequence selected from any of the CDR2 amino acid sequences listed in Table 1-1 or Table 5, or a similar sequence thereof having at least 70%, at least 80%, at least 90%, or at least 95% sequence identity.

[0274] In some embodiments, an anti-TNFR2 antigen-binding protein (e.g., antibody such as single-domain antibody) comprises a CDR2 comprising an amino acid sequence selected from SEQ ID NOs: 2, 9, 13, 17, 21, 25, 29, 33, 37, 41, 45, 4062, 4066, 4070, 4527, 4723-4726, 1687-2245, 4235-4296, and 4557-4580, or a similar sequence thereof having at least 70%, at least 80%, at least 90%, or at least 95% sequence identity.

[0275] Provided herein are anti-TNFR2 antigen-binding proteins (e.g., antibodies such as single-domain antibodies) comprising a CDR3 (CDR3) comprising an amino acid sequence selected from any of the CDR3 amino acid sequences listed in Table 1-1 or Table 5, or a similar sequence thereof having at least 70%, at least 80%, at least 90%, or at least 95% sequence identity.

[0276] In some embodiments, an anti-TNFR2 antigen-binding protein (e.g., antibody such as single-domain antibody) comprises a CDR3 comprising an amino acid sequence selected from SEQ ID NOs: 3, 6, 10, 14, 18, 22, 26, 30, 34, 38, 42, 46, 4063, 4067, 4071, 4524, 4530, 4727-4730, 2246-2804, 4297-4358, and 4581-4604, or a similar sequence thereof having at least 70%, at least 80%, at least 90%, or at least 95% sequence identity.

[0277] Provided herein are anti-TNFR2 antigen-binding proteins (e.g., antibodies such as single-domain antibodies) comprising a set of three CDRs (i.e., CDR1-CDR2-CDR3) contained within any of the exemplary anti-TNFR2 VHH antibodies listed in Tables 1-1, Table 1-2, or Table 5. In certain embodiments, an anti-TNFR2 antigen-binding protein (e.g., antibody such as a single-domain antibody) of the present disclosure comprises
[0278] i) a CDR1 comprising an amino acid sequence of SEQ ID NO: 1, a CDR2 comprising an amino acid sequence of SEQ ID NO: 2, and a CDR3 comprising an amino acid sequence of SEQ ID NO: 3;
[0279] ii) a CDR1 comprising an amino acid sequence of SEQ ID NO: 5, a CDR2 comprising an amino acid sequence of SEQ ID NO: 2, a CDR3 comprising an amino acid sequence of SEQ ID NO: 6;
[0280] iii) a CDR1 comprising an amino acid sequence of SEQ ID NO: 8, a CDR2 comprising an amino acid sequence of SEQ ID NO: 9, a CDR3 comprising an amino acid sequence of SEQ ID NO: 10;
[0281] iv) a CDR1 comprising an amino acid sequence of SEQ ID NO: 12, a CDR2 comprising an amino acid sequence of SEQ ID NO: 13, a CDR3 comprising an amino acid sequence of SEQ ID NO: 14;
[0282] v) a CDR1 comprising an amino acid sequence of SEQ ID NO: 16, a CDR2 comprising an amino acid sequence of SEQ ID NO: 17, a CDR3 comprising an amino acid sequence of SEQ ID NO: 18;
[0283] vi) a CDR1 comprising an amino acid sequence of SEQ ID NO: 20, a CDR2 comprising an amino acid sequence of SEQ ID NO: 21, a CDR3 comprising an amino acid sequence of SEQ ID NO: 22;
[0284] vii) a CDR1 comprising an amino acid sequence of SEQ ID NO: 24, a CDR2 comprising an amino acid sequence of SEQ ID NO: 25, a CDR3 comprising an amino acid sequence of SEQ ID NO: 26;
[0285] viii) a CDR1 comprising an amino acid sequence of SEQ ID NO: 28, a CDR2 comprising an amino acid sequence of SEQ ID NO: 29, a CDR3 comprising an amino acid sequence of SEQ ID NO: 30;
[0286] ix) a CDR1 comprising an amino acid sequence of SEQ ID NO: 32, a CDR2 comprising an amino acid sequence of SEQ ID NO: 33, a CDR3 comprising an amino acid sequence of SEQ ID NO: 34;
[0287] x) a CDR1 comprising an amino acid sequence of SEQ ID NO: 36, a CDR2 comprising an amino acid sequence of SEQ ID NO: 37, a CDR3 comprising an amino acid sequence of SEQ ID NO: 38;
[0288] xi) a CDR1 comprising an amino acid sequence of SEQ ID NO: 40, a CDR2 comprising an amino acid sequence of SEQ ID NO: 41, a CDR3 comprising an amino acid sequence of SEQ ID NO: 42;
[0289] xii) a CDR1 comprising an amino acid sequence of SEQ ID NO: 44, a CDR2 comprising an amino acid sequence of SEQ ID NO: 45, a CDR3 comprising an amino acid sequence of SEQ ID NO: 46;
[0290] xiii) a CDR1 comprising an amino acid sequence of SEQ ID NO: 4061, a CDR2 comprising an amino acid sequence of SEQ ID NO: 4062, a CDR3 comprising an amino acid sequence of SEQ ID NO: 4063;
[0291] xiv). a CDR1 comprising an amino acid sequence of SEQ ID NO: 4065, a CDR2 comprising an amino acid sequence of SEQ ID NO: 4066, a CDR3 comprising an amino acid sequence of SEQ ID NO: 4067;
[0292] xv). a CDR1 comprising an amino acid sequence of SEQ ID NO: 4069, a CDR2 comprising an amino acid sequence of SEQ ID NO: 4070, a CDR3 comprising an amino acid sequence of SEQ ID NO: 4071;
[0293] xvi). a CDR1 comprising an amino acid sequence of SEQ ID NO: 4520, a CDR2 comprising an amino acid sequence of SEQ ID NO: 45, a CDR3 comprising an amino acid sequence of SEQ ID NO: 46;
[0294] xvii). a CDR1 comprising an amino acid sequence of SEQ ID NO: 8, a CDR2 comprising an amino acid sequence of SEQ ID NO: 9, a CDR3 comprising an amino acid sequence of SEQ ID NO: 4524;
[0295] xviii). a CDR1 comprising an amino acid sequence of SEQ ID NO: 16, a CDR2 comprising an amino acid sequence of SEQ ID NO: 4527, a CDR3 comprising an amino acid sequence of SEQ ID NO: 18;
[0296] ix). a CDR1 comprising an amino acid sequence of SEQ ID NO: 16, a CDR2 comprising an amino acid sequence of SEQ ID NO: 4527, a CDR3 comprising an amino acid sequence of SEQ ID NO: 4530;
[0297] x). a CDR1 comprising an amino acid sequence of SEQ ID NO: 4719, a CDR2 comprising an amino acid sequence of SEQ ID NO: 4723, a CDR3 comprising an amino acid sequence of SEQ ID NO: 4727;
[0298] xii). a CDR1 comprising an amino acid sequence of SEQ ID NO: 4720, a CDR2 comprising an amino acid sequence of SEQ ID NO: 4724, a CDR3 comprising an amino acid sequence of SEQ ID NO: 4728;
[0299] xiii). a CDR1 comprising an amino acid sequence of SEQ ID NO: 4721, a CDR2 comprising an amino acid sequence of SEQ ID NO: 4725, a CDR3 comprising an amino acid sequence of SEQ ID NO: 4729; or
[0300] xiv).). a CDR1 comprising an amino acid sequence of SEQ ID NO: 4722, a CDR2 comprising an amino acid sequence of SEQ ID NO: 4726, a CDR3 comprising an amino acid sequence of SEQ ID NO: 4730.

[0301] In some embodiments, an anti-TNFR2 antigen-binding protein (e.g., antibody such as single-domain antibody) comprises
[0302] a) a CDR1 comprising an amino acid sequence of SEQ ID NO: 16, a CDR2 comprising an amino acid sequence of SEQ ID NO: 17, a CDR3 comprising an amino acid sequence of SEQ ID NO: 18;
[0303] b). a CDR1 comprising an amino acid sequence of SEQ ID NO: 16, a CDR2 comprising an amino acid sequence of SEQ ID NO: 4527, a CDR3 comprising an amino acid sequence of SEQ ID NO: 18;
[0304] c). a CDR1 comprising an amino acid sequence of SEQ ID NO: 16, a CDR2 comprising an amino acid sequence of SEQ ID NO: 4527, a CDR3 comprising an amino acid sequence of SEQ ID NO: 4530;
[0305] d) a CDR1 comprising an amino acid sequence of SEQ ID NO: 8, a CDR2 comprising an amino acid sequence of SEQ ID NO: 9, a CDR3 comprising an amino acid sequence of SEQ ID NO: 10;
[0306] e). a CDR1 comprising an amino acid sequence of SEQ ID NO: 8, a CDR2 comprising an amino acid sequence of SEQ ID NO: 9, a CDR3 comprising an amino acid sequence of SEQ ID NO: 4524;
[0307] f). a CDR1 comprising an amino acid sequence of SEQ ID NO: 4069, a CDR2 comprising an amino acid sequence of SEQ ID NO: 4070, a CDR3 comprising an amino acid sequence of SEQ ID NO: 4071;
[0308] g). a CDR1 comprising an amino acid sequence of SEQ ID NO: 4719, a CDR2 comprising an amino acid sequence of SEQ ID NO: 4723, a CDR3 comprising an amino acid sequence of SEQ ID NO: 4727;
[0309] h). a CDR1 comprising an amino acid sequence of SEQ ID NO: 4720, a CDR2 comprising an amino acid sequence of SEQ ID NO: 4724, a CDR3 comprising an amino acid sequence of SEQ ID NO: 4728;
[0310] i). a CDR1 comprising an amino acid sequence of SEQ ID NO: 4721, a CDR2 comprising an amino acid sequence of SEQ ID NO: 4725, a CDR3 comprising an amino acid sequence of SEQ ID NO: 4729; or
[0311] j).). a CDR1 comprising an amino acid sequence of SEQ ID NO: 4722, a CDR2 comprising an amino acid sequence of SEQ ID NO: 4726, a CDR3 comprising an amino acid sequence of SEQ ID NO: 4730.

[0312] In a related embodiment, provided herein are anti-TNFR2 antigen-binding proteins (e.g., antibodies such as single-domain antibodies) comprising a set of three CDRs (I.e., CDR1-CDR2-CDR3) contained within a VHH amino acid sequence as defined by any of the exemplary anti-TNFR2 VHH antibodies listed in Table 1-1, Table 1-2, or Table 5. For example, provided herein are antibodies, or antigen-binding fragments thereof, comprising the set of CDR1-CDR2-CDR3 amino acid sequences contained within a VHH amino acid sequence selected from SEQ ID NOs: 4, 7, 11, 15, 19, 23, 27, 31, 35, 39, 43, 47, 4064, 4068, 4072, 4521, 81-92, 93-640, 4079-4125, 2805-3363, 4359-4420, 4605-4628, 5426, 4529, 4532, 4078, 4523, 4076, 4077, 4078, and 4731-4734.

[0313] In some embodiments, an anti-TNFR2 antigen-binding protein (e.g., antibody such as a single-domain antibody) of the present disclosure can include
[0314] a) a variable domain that comprises a CDR1, CDR2, and CDR3 contained within a VHH comprising the amino acid sequence of SEQ ID NO: 4;
[0315] b) a variable domain that comprises a CDR1, CDR2, and CDR3 contained within a VHH comprising the amino acid sequence of SEQ ID NO: 7;
[0316] c) a variable domain that comprises a CDR1, CDR2, and CDR3 contained within a VHH comprising the amino acid sequence of SEQ ID NO: 11;
[0317] d) a variable domain that comprises a CDR1, CDR2, and CDR3 contained within a VHH comprising the amino acid sequence of SEQ ID NO: 15;
[0318] e) a variable domain that comprises a CDR1, CDR2, and CDR3 contained within a VHH comprising the amino acid sequence of SEQ ID NO: 19;
[0319] f) a variable domain that comprises a CDR1, CDR2, and CDR3 contained within a VHH comprising the amino acid sequence of SEQ ID NO: 23;
[0320] g) a variable domain that comprises a CDR1, CDR2, and CDR3 contained within a VHH comprising the amino acid sequence of SEQ ID NO: 27;
[0321] h) a variable domain that comprises a CDR1, CDR2, and CDR3 contained within a VHH comprising the amino acid sequence of SEQ ID NO: 31;
[0322] i) a variable domain that comprises a CDR1, CDR2, and CDR3 contained within a VHH comprising the amino acid sequence of SEQ ID NO: 35;
[0323] j) a variable domain that comprises a CDR1, CDR2, and CDR3 contained within a VHH comprising the amino acid sequence of SEQ ID NO: 39;
[0324] k) a variable domain that comprises a CDR1, CDR2, and CDR3 contained within a VHH comprising the amino acid sequence of SEQ ID NO: 43;
[0325] l) a variable domain that comprises a CDR1, CDR2, and CDR3 contained within a VHH comprising the amino acid sequence of SEQ ID NO: 47;
[0326] m). a variable domain that comprises a CDR1, CDR2, and CDR3 contained within a VHH comprising the amino acid sequence of SEQ ID NO: 4064;
[0327] n). a variable domain that comprises a CDR1, CDR2, and CDR3 contained within a VHH comprising the amino acid sequence of SEQ ID NO: 4068;
[0328] o). a variable domain that comprises a CDR1, CDR2, and CDR3 contained within a VHH comprising the amino acid sequence of SEQ ID NO: 4072;
[0329] p). a variable domain that comprises a CDR1, CDR2, and CDR3 contained within a VHH comprising the amino acid sequence of SEQ ID NO: 4521;
[0330] q). a variable domain that comprises a CDR1, CDR2, and CDR3 contained within a VHH comprising the amino acid sequence of SEQ ID NO: 4526;
[0331] r) a variable domain that comprises a CDR1, CDR2, and CDR3 contained within a VHH comprising the amino acid sequence of SEQ ID NO: 4529;
[0332] s) a variable domain that comprises a CDR1, CDR2, and CDR3 contained within a VHH comprising the amino acid sequence of SEQ ID NO: 4532;
[0333] t) a variable domain that comprises a CDR1, CDR2, and CDR3 contained within a VHH comprising the amino acid sequence of SEQ ID NO: 4078;
[0334] u) a variable domain that comprises a CDR1, CDR2, and CDR3 contained within a VHH comprising the amino acid sequence of SEQ ID NO: 4731;
[0335] v) a variable domain that comprises a CDR1, CDR2, and CDR3 contained within a VHH comprising the amino acid sequence of SEQ ID NO: 4732;
[0336] w) a variable domain that comprises a CDR1, CDR2, and CDR3 contained within a VHH comprising the amino acid sequence of SEQ ID NO: 4733;
[0337] x) a variable domain that comprises a CDR1, CDR2, and CDR3 contained within a VHH comprising the amino acid sequence of SEQ ID NO: 4734.

[0338] In some embodiments, an anti-TNFR2 antigen-binding protein (e.g., antibody such as a single-domain antibody) of the present disclosure can include
[0339] a) a variable domain that comprises a CDR1, CDR2, and CDR3 contained within a VHH comprising the amino acid sequence of SEQ ID NO: 19;
[0340] b). a variable domain that comprises a CDR1, CDR2, and CDR3 contained within a VHH comprising the amino acid sequence of SEQ ID NO: 4072;
[0341] c). a variable domain that comprises a CDR1, CDR2, and CDR3 contained within a VHH comprising the amino acid sequence of SEQ ID NO: 4526;
[0342] d) a variable domain that comprises a CDR1, CDR2, and CDR3 contained within a VHH comprising the amino acid sequence of SEQ ID NO: 4529;
[0343] e) a variable domain that comprises a CDR1, CDR2, and CDR3 contained within a VHH comprising the amino acid sequence of SEQ ID NO: 4532;
[0344] f) a variable domain that comprises a CDR1, CDR2, and CDR3 contained within a VHH comprising the amino acid sequence of SEQ ID NO: 4731;
[0345] g) a variable domain that comprises a CDR1, CDR2, and CDR3 contained within a VHH comprising the amino acid sequence of SEQ ID NO: 4732;
[0346] h) a variable domain that comprises a CDR1, CDR2, and CDR3 contained within a VHH comprising the amino acid sequence of SEQ ID NO: 4733; or
[0347] i) a variable domain that comprises a CDR1, CDR2, and CDR3 contained within a VHH comprising the amino acid sequence of SEQ ID NO: 4734.

[0348] In an embodiment provided herein, an anti-TNFR2 antigen-binding protein (e.g., antibody such as a single-domain antibody) of the present disclosure can include a VHH amino acid sequence selected from SEQ ID NOs: 4, 7, 11, 15, 19, 23, 27, 31, 35, 39, 43, 47, 4064, 4068, 4072, 4521, 93-640, 4079-4125, 2805-3363, 4359-4420, 4605-4628, and 4653-4685, or a similar sequence thereof having at least 70%, at least 75%, at least 80%, at least 85%, at least 90%, at least 95%, at least 98%, or at least 99% sequence identity.

[0349] In an embodiment provided herein, an anti-TNFR2 antigen-binding protein (e.g., antibody such as a single-domain antibody) of the present disclosure can include a VHH amino acid sequence selected from SEQ ID NOs: 4, 7, 11, 15, 19, 23, 27, 31, 35, 39, 43, 47, 4064, 4068, 4072, 4521, and 4653-4685 or a similar sequence thereof having at least 70%, at least 75%, at least 80%, at least 85%, at least 90%, at least 95%, at least 98%, or at least 99% sequence identity.

[0350] In an embodiment provided herein, an anti-TNFR2 antigen-binding protein (e.g., antibody such as a single-domain antibody) of the present disclosure can include a humanized VHH amino acid sequence selected from SEQ ID NOs: 81-92, 4076-4078, 4523, 4526, 4529, 4532, 4731-4734, 641-1127, and 4126-4172, or a similar sequence thereof having at least 70%, at least 75%, at least 80%, at least 85%, at least 90%, at least 95%, at least 98%, or at least 99% sequence identity.

[0351] In an embodiment provided herein, an anti-TNFR2 antigen-binding protein (e.g., antibody such as a single-domain antibody) of the present disclosure can include a VHH amino acid sequence selected from SEQ ID NOs: 19, 4072, 4078, 4526, 4529, 4532, and 4653-4685 or a similar sequence thereof having at least 70%, at least 75%, at least 80%, at least 85%, at least 90%, at least 95%, at least 98%, or at least 99% sequence identity.

[0352] In some embodiments, the present disclosure also provides an anti-TNFR2 antigen-binding protein (e.g., antibody such as a single-domain antibody) that competes for binding to TNFR2 with any one of the exemplary anti-TNFR2 VHH antibodies listed in Table 1-1, Table 1-2, or Table 5.

[0353] In some embodiments, the present disclosure also provides an anti-TNFR2 antigen-binding protein (e.g., antibody such as a single-domain antibody) that binds to the same epitope on TNFR2 as any one of the exemplary anti-TNFR2 VHH antibodies listed in Table 1-1, Table 1-2, or Table 5.

### Single-Domain Antibodies

[0354] A single-domain antibody (e.g., VHH) can be obtained by immunization of dromedaries, camels, llamas, alpacas, or sharks with the desired antigen and subsequent isolation of the mRNA coding for heavy-chain antibodies. Antigens can be purified from natural sources, or in the course of recombinant production. Immunization and/or screening for immunoglobulin sequences can be performed using peptide fragments of such antigens. By reverse transcription and polymerase chain reaction (PCR), a gene library of single-domain antibodies containing several million clones can be produced. Screening techniques such as phage display, yeast display, and ribosome display help to identify the clones binding the antigen. Methods generation of heavy-chain antibody fragments are described in e.g., WO 94/04678; Hamers-Casterman et al. 1993; Muyldermans et al. 2001; and Arbabi Ghahroudi, M. et al. (1997). FEBS Letters 414 (3): 521-526, each of which is incorporated herein by reference in its entirety.

[0355] A different method may use gene libraries from animals that have not been previously immunized. Such naïve libraries usually contain only antibodies with low affinity to the desired antigen, making it necessary to apply affinity maturation by random mutagenesis as an additional step. See e.g., Saerens, D.; et al. (2008). “Single-domain antibodies as building blocks for novel therapeutics”. Current Opinion in Pharmacology 8 (5): 600-608.

[0356] Affinity maturation strategies can be categorized as either targeted/rational approaches or untargeted/random approaches. For targeted approaches information about the VHH of interest is needed, such as hot spots for affinity maturation or structural information on the VHH: antigen complex, whereas for untargeted approaches no prior information is needed. Targeted approaches that may be applied for affinity maturation of VHHs include site-directed in-vitro mutagenesis and in-silico/computational approaches. Common untargeted approaches used for affinity maturation of VHHs include random in-vitro mutagenesis, CDR swapping and autonomous hypermutation yeast surface display, with the latter two being novel, emerging and very time efficient techniques. Most of these strategies have in common, that after applying a certain randomization strategy to generate a mutational library, the resulting library can be screened by employing standard display techniques such as yeast, phage or ribosome display to select for the best binders. The choice of the display system is often guided by the library size to be displayed, with yeast display being able to handle library sizes of ~10⁷-10⁹, phage display ~10⁸-10¹⁰ and ribosome display ~10¹²-10¹³ (Chan and Groves, 2021). Notably, during affinity maturation the number of highly interactive residues such as aromatic amino acids usually increase in the CDR regions. The selected affinity matured clones may be further evaluated by a developability assessment to test for undesired properties, such as unspecific binding to off-targets or VHH instability.

[0357] For targeted in vitro mutagenesis, a set of selected residues within the CDRs of a VHH may be mutated (Tiller et al., 2017; Yau et al., 2005). Pre-selection of these residues can be either performed using alanine scanning to identify hot spot residues for mutation or by using structural data of the antigen:VHH complex to identify positions to be mutated. These sites can then be either submitted to saturating mutagenesis to substitute a specific site with all possible amino acids or specific amino acid substitutions yielding several smaller libraries. After mutagenesis binders can be displayed to select the best matured candidate. Usually, several rounds of targeted mutagenesis are performed with separate sub-libraries to obtain combinations of individual mutations that cooperatively result in increased binding affinity.

[0358] Computer-aided/in silico methods are often used to guide targeted in vitro mutagenesis. Using homology modeling of the target:VHH complex or docking, hotspots for mutations can be identified that are then submitted to in vitro mutagenesis (Bert Schepens et al., 2021; Cheng et al., 2019; Inoue et al., 2013; Mahajan et al., 2018). Further, in silico methods can search all designed variants in a virtual library (~10₄₀ members) in a rather short amount of time to identify a feasible number of promising candidates to be tested experimentally. These techniques can be especially valuable if structural data on the drug-target interaction are available.

[0359] Untargeted/random affinity maturation strategies that can be applied to affinity mature VHHs include random in vitro mutagenesis, CDR shuffling/swapping and in vivo affinity maturation via yeast display. For random in vitro mutagenesis the sequence of either the entire VHH or only the CDRs are mutated randomly (Chen et al., 2021; Ye et al., 2021; Zupancic et al., 2021). The most commonly used technique is error prone PCR employing a DNA polymerase that lacks proof reading activity and PCR conditions that increase the polymerase error rate even further. This technique can be applied without further structural knowledge or information on the importance of residues that contribute to antigen:VHH interaction. The resulting mutational library can then be displayed to select the best matured candidate. This technique may also be combined with NGS sequencing of the display elutions to get an in-depth readout of all obtained candidates, enabling the identification of low abundant but still promising clones (Chen et al., 2021).

[0360] In some embodiments, CDR shuffling or swapping is applied for VHH affinity maturation, such as described in Zupancic et al., 2021. For CDR swapping, enriched libraries can be used as input material for a PCR reaction to individually amplify the CDR of the VHHs. The PCR products can then be mixed and reassembled using overlapping PCR to generate the entire plasmid for further rounds of display to select for the best matured binder. One limitation of this approach is that it can only be used for VHHs comprising the same framework as it is the case for synthetic libraries.

[0361] In some embodiments, in vivo affinity maturation via yeast display is applied for VHH affinity maturation, such as described in Wellner et al., 2021. The method is based on an autonomous hypermutation yeast surface display (AHEAD), which imitates somatic hypermutation during VHH selection using engineered yeast strains. The yeast's error prone orthogonal DNA replication system can generate new variants during plasmid replication by randomly introducing mutations. The new variants can then be displayed and selected using yeast surface display to identify the best binders. This enables the production of high affinity clones in very little time (about 2 weeks), which is significantly faster than classical affinity maturation procedures. The method can be applied using synthetic or immune libraries using unenriched libraries enriched libraries or a subset of preselected clones.

[0362] In case binders with medium affinity are required, as it is the case for the anti-TNFR2 V-bodies and the affinity of the identified candidates need to be decreased, very similar techniques can be applied. For example, mutations that are aiming at lowering the affinity can be introduced using the same targeted or untargeted approaches as described for the affinity maturation. The selection afterwards can be adapted accordingly. If larger libraries are generated that need to be screened via a display technique, the selection strategy can be adapted to enrich medium affinity binders while excluding high affinity candidates. This could, for example be a pre-panning in phage display with low antigen concentration to remove all higher affinity candidates, followed by a selection with high antigen concentration to obtain medium affinity VHHs. For library sizes of up to 1000 candidates a kinetic off-rate characterization can be used to get immediate information about the kinetic behavior of the candidates.

[0363] When the most potent clones have been identified, their DNA sequence can be optimized, for example to improve their stability towards enzymes. Another goal is humanization to prevent immunological reactions of the human organism against the antibody. Humanization can be achieved based on the homology between camelid VHH and human VH fragments, which is described in further detail below. Finally, the optimized single-domain antibody can be translated and expressed in suitable organisms such as E. coli or Saccharomyces cerevisiae.

[0364] Single-domain antibodies can also be derived from conventional antibodies. In some embodiments, single-domain antibodies can be made from conventional murine or human IgG with four chains. The process is similar, comprising gene libraries from immunized or naïve donors and display techniques for identification of the most specific antigens. However, the binding region of a conventional IgG consists of two domains (VH and VL), which tend to dimerize or aggregate because of their lipophilicity. Monomerization can be accomplished by replacing lipophilic by hydrophilic amino acids. (See e.g., Borrebaeck, C. A. K.; Ohlin, M. (2002). “Antibody evolution beyond Nature”, Nature Biotechnology 20 (12): 1189-90.) If affinity can be retained after monomerization, the single-domain antibodies can likewise be produced in E. coli, S. cerevisiae or other suitable organisms.

[0365] A “humanized antibody” refers to a chimeric, genetically engineered, antibody in which the amino acid sequences (typically CDRs) from an antibody (donor antibody), e.g., a camelid antibody, are grafted onto a human antibody (acceptor antibody). Thus, a humanized antibody typically comprises CDRs from a donor antibody and variable region framework and constant regions, when present, from a human antibody. Accordingly, a “humanized VHH” comprises CDRs that corresponds to the CDRs of a naturally occurring VHH domain (e.g., a camelid VHH), but that has been “humanized”. Humanized VHH may be prepared by replacing one or more amino acid residues in the amino acid sequence of the naturally occurring VHH sequence (particularly in the framework sequences) by one or more of the amino acid residues that occur at the corresponding position(s) in a VH domain from a conventional 4-chain human antibody. Such humanized VHHs can be obtained in any suitable manner known to a skilled person in the art and thus not strictly limited to methods described herein.

[0366] Humanization of VHHs can achieved using resurfacing or CDR grafting. Resurfacing strategies have been described in e.g., Conrath et al., 2005 J Mol Biol; Kazemi-Lomedasht et al., 2018; Vincke et al., 2009 J Biol Chem, and CDR grafting strategies have been described in e.g., ben Abderrazek et al., 2011; van Faassen et al., 2020 FASEB; Li et al., 2018; Vaneycken et al., 2010; Vincke et al., 2009 J Biol Chem; and Yu et al., 2017, each of which is incorporated herein by reference in its entirety.

[0367] To humanize a camelid VHH using a resurfacing approach, a human germline reference that is most similar to the camelid germline sequence of the selected VHH may be identified. Most of the isolated camelid VHHs in literature belong to the camelid IGHV3 subfamily 2 (Nguyen et al., 2000, EMBO J) with DP-47/VH3-23 from the IGHV3 family commonly used as human reference. The framework of the camelid VHH can then be compared to the human reference sequence. Surface exposed residues are substituted to their human counterpart as it is assumed that their contribution to protein stability is rather low. Buried residues however remain of camelid origin, as they likely contribute to the overall VHH stability. Humanization of framework regions 1, 3 and 4 usually does not impact the physicochemical properties of the VHHs, whereas a general humanization of framework 2 would significantly increase local hydrophobicity. Residues H37, H44, H45 and H47 (Chothia numbering) in framework 2, the so called tetrade or hallmark residues, have a rather hydrophobic nature in human VHs (VGLW) as they are partially buried and involved in VH/VL paring, while in camelid VHHs these residues are partially charged (FERG), which significantly increases VHH solubility and inhibits paring of camelid VL (Soler et al., 2021, Biomolecules, Conrath et al., 2005 J Mol Biol). Further, residues H37 and H47 are known to interact with the CDR-H3 loop in many VHHs, stabilizing its conformation and thereby contributing to antigen binding affinity. In addition, a significant number of VHHs use framework 2 residues H44, H45 and H47 for antigen binding (Zavrtanik et al., 2018, J Mol Biol). A full humanization of these residues hence frequently results in reduced solubility or aggregation of the VHHs and a reduced or complete loss of binding affinity for the target antigen (van Faassen et al., 2020, Vincke et al., 2009). In consequence, all or at least some of these hallmark residues in framework 2 remain of camelid origin when humanizing VHHs.

[0368] Another approach that may be applied to humanize VHHs is CDR grafting. CDRs of the selected VHHs can be transplanted onto a universal VHH framework that has been partially or fully humanized (Saerens et al., 2009 J Biol Chem, Soler et al., 2021, Vincke et al., 2009 J Biol Chem). CDR grafting has been successfully used in some cases but failed for several others, with VHHs frequently losing their potential to bind to the desired antigen and/or becoming structurally instable with a high tendency to aggregate (van Faassen et al., 2020, FASEB). This is mostly attributed to interactions of CDR3 with specific residues in framework 2 that are important for CDR3 conformation, general VHH stability and overall hydrophobicity, which are impaired by this approach. Sometimes camelid backmutations are introduced into the framework to compensate for these effects (van Faassen et al., 2020, FASEB).

[0369] An alternative strategy to mitigate the need of humanizing the selected VHH sequences is to use fully or partially humanized synthetic VHH libraries instead of camelid immune libraries for VHH discovery (Moutel et al. 2016, eLife; McMahon, 2018, NSMB; Zimmermann et al., 2018, eLife). In many of these libraries the hallmark residues are still of camelid origin for reasons discussed above.

[0370] Other suitable humanizing substitutions are described in WO 09/138519 and WO 08/020079, as well as Tables A-3 to A-8 from WO 08/020079 (which are lists showing possible humanizing substitutions), each of which is incorporated herein by reference in its entirety. Non-limiting examples of such humanizing substitutions include Q108L and A14P. Such humanizing substitutions may also be suitably combined with one or more other mutations as described herein (such as with one or more mutations that reduce binding by pre-existing antibodies).

[0371] In some embodiments, humanized VHH sequences still retain the residues that are relevant for protein A binding. In some embodiments, the engineering activities during humanization may be applied to engineer protein A binding properties into a VHH that did previously not interact with protein A (Graille et al., 2000, PNAS).

[0372] Like a “humanized antibody”, a “camelized antibody” refers to an antibody having amino acid sequences (typically CDRs) from a donor antibody, e.g., a human antibody, and variable region framework and constant regions, when present, from a camelid antibody. Accordingly, a “camelized VH” comprises an amino acid sequence that corresponds to the amino acid sequence of a naturally occurring VH domain, but that has been “camelized”. Camelized VH may be prepared by replacing one or more amino acid residues in the amino acid sequence of a naturally occurring VH domain from a conventional 4-chain antibody by one or more of the amino acid residues that occur at the corresponding position(s) in a VHH domain of a heavy chain antibody. This can be performed in a manner, for example as described in WO 2008/020079. Such “camelizing” substitutions are usually inserted at amino acid positions that form and/or are present at the VH-VL interface, and/or at the so-called Camelidae hallmark residues, e.g., F37, E44, R45 and F47 (see for example WO 94/04678 and Davies and Riechmann (1994 and 1996)). In one embodiment, the VH sequence that is used as a starting material or starting point for generating or designing the camelized VH is a VH sequence from a mammal, or the VH sequence of a human antibody. However, such camelized VH can be obtained in any suitable manner known to a skilled person in the art and thus are not strictly limited to polypeptides that have been obtained using a polypeptide that comprises a naturally occurring VH domain as a starting material.

[0373] The amino acid residues of a single-domain antibody can be numbered according to the general numbering for VH domains given by Kabat et al. (“Sequence of proteins of immunological interest”, US Public Health Services, NIH Bethesda, Md., Publication No. 91), as applied to VHH domains from Camelids described in Riechmann and Muyldermans, 2000 (J. Immunol. Methods 240 (1-2): 185-195; see for example FIG. 2 of this publication). The total number of amino acid residues in each of the CDRs may vary and may not correspond to the total number of amino acid residues indicated by the Kabat numbering. For example, one or more positions according to the Kabat numbering may not be occupied in the actual sequence, or the actual sequence may contain more amino acid residues than the number allowed for by the Kabat numbering. As a result, the numbering according to Kabat may or may not correspond to the actual numbering of the amino acid residues in the actual sequence. The total number of amino acid residues in a VH domain and a VHH domain is usually in the range of from 110 to 120, often between 112 and 115. However, smaller, and longer sequences may also be suitable for the purposes described herein.

[0374] Determination of CDR regions in a single-domain antibody may be accomplished using different methods, including those described by Kabat et al. (1991), “Sequences of Proteins of Immunological Interest,” 5th Ed. Public Health Service, National Institutes of Health, Bethesda, Md. (“Kabat” numbering scheme); Al-Lazikani et al., (1997) JMB 273,927-948 (“Chothia” numbering scheme); MacCallum et al., J. Mol. Biol. 262:732-745 (1996), “Antibody-antigen interactions: Contact analysis and binding site topography,” J. Mol. Biol. 262, 732-745.” (“Contact” numbering scheme); Lefranc M P et al., “IMGT unique numbering for immunoglobulin and T cell receptor variable domains and Ig superfamily V-like domains,” Dev Comp Immunol, 2003 January; 27 (1): 55-77 (“IMGT” numbering scheme); Honegger A and Plückthun A, “Yet another numbering scheme for immunoglobulin variable domains: an automatic modeling and analysis tool,” J Mol Biol, 2001 Jun. 8; 309 (3): 657-70, (“Aho” numbering scheme); and Martin et al., “Modeling antibody hypervariable loops: a combined algorithm,” PNAS, 1989, 86 (23): 9268-9272, (“AbM” numbering scheme), each reference cited herein is incorporated by reference in its entirety.

[0375] The boundaries of a given CDR or framework (FR) may vary depending on the scheme used for identification. For example, the Kabat scheme is based on structural alignments, while the Chothia scheme is based on structural information. Numbering for both the Kabat and Chothia schemes is based upon the most common antibody region sequence lengths, with insertions accommodated by insertion letters, for example, “30a,” and deletions appearing in some antibodies. The two schemes place certain insertions and deletions (“indels”) at different positions, resulting in differential numbering. The Contact scheme is based on analysis of complex crystal structures and is similar in many respects to the Chothia numbering scheme. The AbM scheme is a compromise between Kabat and Chothia definitions based on that used by Oxford Molecular's AbM antibody modeling software.

[0376] In some embodiments, CDRs can be defined in accordance with any of the Kabat numbering scheme, the Chothia numbering scheme, a combination of Kabat and Chothia, the AbM numbering scheme, and/or the Contact numbering scheme. A VHH typically comprises three CDRs, designated CDR1, CDR2, and CDR3. Table 1-3, below, lists exemplary position boundaries of CDR-H1, CDR-H2, CDR-H3 as identified by Kabat, Chothia, AbM, and Contact schemes, respectively. For CDR-H1, residue numbering is listed using both the Kabat and Chothia numbering schemes. FRs are located between CDRs, for example, with FR-H1 located before CDR-H1, FR-H2 located between CDR-H1 and CDR-H2, FR-H3 located between CDR-H2 and CDR-H3 and so forth. It is noted that because the shown Kabat numbering scheme places insertions at H35A and H35B, the end of the Chothia CDR-H1 loop when numbered using the shown Kabat numbering convention varies between H32 and H34, depending on the length of the loop.

TABLE 1-3
CDRs definitions according to various numbering schemes

| CDR | Kabat | Chothia | AbM | Contact |
|---|---|---|---|---|
| CDR-H1 | H31-H35B | H26-H32 . . . 34 | H26-H35B | H30-H35B |
| (Kabat | | | | |
| Numbering¹) | | | | |
| CDR-H1 | H31-H35 | H26-H32 | H26-H35 | H30-H35 |
| (Chothia | | | | |
| Numbering²) | | | | |
| CDR-H2 | H50-H65 | H52-H56 | H50-H58 | H47-H58 |
| CDR-H3 | H95-H102 | H95-H102 | H95-H102 | H93-H101 |

¹Kabat et al. (1991), “Sequences of Proteins of Immunological Interest,” 5th Ed. Public Health Service, National Institutes of Health, Bethesda, MD;
²Al-Lazikani et al., (1997) JMB 273, 927-948

[0377] Thus, unless otherwise specified, a “CDR” or “complementary determining region,” or individual specified CDRs (e.g., CDR-H1, CDR-H2, CDR-H3), of a given antibody or region thereof, such as a variable region thereof, should be understood to encompass a (or the specific) CDR as defined by any of the above-mentioned schemes. For example, where it is stated that a particular CDR (e.g., a CDR-H3) contains the amino acid sequence of a corresponding CDR in a given VHH amino acid sequence, it is understood that such a CDR has a sequence of the corresponding CDR (e.g., CDR-H3) within the VHH, as defined by any of the above-mentioned schemes. In some embodiments, specific CDR sequences are specified. Exemplary CDR sequences of provided antibodies are described using various numbering schemes (see e.g., Table 1-3), although it is understood that a provided antibody can include CDRs as described according to any of the other above-mentioned numbering schemes or other numbering schemes known to a person of ordinary skill in the art.

[0378] In a single-domain antibody sequence of the present disclosure, the framework sequences may be any suitable framework sequences. For example, the framework sequences may be framework sequences derived from a heavy chain variable domain (e.g., a VH sequence or VHH sequence). In some embodiments, the framework sequences are either framework sequences that have been derived from a VHH sequence (in which said framework sequences may optionally have been partially or fully humanized) or are conventional VH sequences (in which said framework sequences may optionally have been partially or fully camelized).

[0379] Antigen-binding fragments (or combinations of fragments) of any of single-domain antibodies described herein, such as fragments that contain one or more CDR sequences, suitably flanked by and/or linked via one or more framework sequences, are also encompassed within the present disclosure.

[0380] It should be noted, however, that the present disclosure is not limited to the origin of the single-domain antibody (or of the nucleotide sequence used to express it), nor to the way that the single-domain antibody or nucleotide sequence is generated or obtained. Thus, an antigen-binding protein of the present disclosure may comprise naturally occurring sequences (from a suitable species), recombinant sequences, or synthetic or semi-synthetic sequences. Similarly, nucleotide sequences encoding antigen-binding proteins of the present disclosure may comprise naturally occurring nucleotide sequences, recombinant sequences, or synthetic or semi-synthetic sequences (for example, sequences that are prepared by PCR or isolated from a library).

[0381] Anti-TNFR2 antigen-binding proteins (e.g., antibodies such single-domain antibodies) of the present disclosure may comprise one or more amino acid substitutions, insertions and/or deletions in the framework and/or CDR regions of the heavy chain variable domains as compared to the exemplary antibody sequences provided herein. Such mutations can be readily ascertained by comparing the amino acid sequences disclosed herein to germline sequences available from, for example, public antibody sequence databases. The antigen-binding molecules of the present disclosure may comprise antigen-binding domains which are derived from any of the exemplary amino acid sequences disclosed herein, wherein one or more amino acids within one or more framework and/or CDR regions are mutated to the corresponding residue(s) of the germline sequence from which the antibody was derived, or to the corresponding residue(s) of another germline sequence, or to a conservative amino acid substitution of the corresponding germline residue(s) (such sequence changes are referred to herein collectively as “germline mutations”). A person of ordinary skill in the art, starting with the heavy chain variable region sequences disclosed herein, can easily produce numerous antibodies and antigen-binding fragments which comprise one or more individual germline mutations or combinations thereof. In certain embodiments, all of the framework and/or CDR residues within the VHH domains are mutated back to the residues found in the original germline sequence from which the antigen-binding domain was originally derived. In other embodiments, only certain residues are mutated back to the original germline sequence, e.g., only the mutated residues found within the first 8 amino acids of FR1 or within the last 8 amino acids of FR4, or only the mutated residues found within CDR1, CDR2 or CDR3. In other embodiments, one or more of the framework and/or CDR residue(s) are mutated to the corresponding residue(s) of a different germline sequence (i.e., a germline sequence that is different from the germline sequence from which the antigen-binding domain was originally derived).

[0382] Furthermore, the antigen-binding domains may contain any combination of two or more germline mutations within the framework and/or CDR regions, e.g., wherein certain individual residues are mutated to the corresponding residue of a particular germline sequence while certain other residues that differ from the original germline sequence are maintained or are mutated to the corresponding residue of a different germline sequence. Once obtained, antigen-binding domains that contain one or more germline mutations can be easily tested for one or more desired property such as, improved binding specificity, increased binding affinity, improved, or enhanced biological properties (e.g., agonistic effect), reduced immunogenicity, etc. Antigen-binding proteins comprising one or more antigen-binding domains obtained in this general manner are encompassed within the present disclosure.

[0383] Provided herein are anti-TNFR2 antigen-binding proteins comprising variants of any of the VHH and/or CDR amino acid sequences disclosed herein having one or more amino acid substitutions. For example, the present disclosure includes anti-TNFR2 antigen-binding proteins having VHH and/or CDR amino acid sequences with, e.g., 10 or fewer, 8 or fewer, 6 or fewer, 4 or fewer, 3 or fewer, 2, or 1 amino acid substitutions relative to any of the VHH and/or CDR amino acid sequences set forth in Tables 1-1 and 1-2 herein. Amino acid substitutions may be introduced into an antigen-binding protein of interest and the resultant variants can screened for a desired activity, for example, retained/improved antigen binding, decreased immunogenicity, or reduced ADCC or CDC.

[0384] Amino acids may be grouped according to common side-chain properties: (1) hydrophobic: Norleucine, Met, Ala, Val, Leu, Ile; (2) neutral hydrophilic: Cys, Ser, Thr, Asn, Gln; (3) acidic: Asp, Glu; (4) basic: His, Lys, Arg; (5) residues that influence chain orientation: Gly, Pro; (6) aromatic: Trp, Tyr, Phe. In some embodiments, an amino acid substitution is a conservative substitution, meaning exchanging an amino acid with another amino acid of the same class. In some embodiments, amino acid substitutions may also include a non-conservative substitution, meaning exchanging an amino acid with an amino acid of a different class. Other exemplary amino acid substitutions are shown in Table 1-4.

TABLE 1-4
Exemplary amino acid substitutions

| Original Residue | Exemplary Substitutions |
|---|---|
| Ala (A) | Val; Leu; Ile |
| Arg (R) | Lys; Gln; Asn |
| Asn (N) | Gln; His; Asp, Lys; Arg |
| Asp (D) | Glu; Asn |
| Cys (C) | Ser; Ala |
| Gln (Q) | Asn; Glu |
| Glu (E) | Asp; Gln |
| Gly (G) | Ala |
| His (H) | Asn; Gln; Lys; Arg |
| Ile (I) | Leu; Val; Met; Ala; Phe; Norleucine |
| Leu (L) | Norleucine; Ile; Val; Met; Ala; Phe |
| Lys (K) | Årg; Gln; Asn |
| Met (M) | Leu; Phe; Ile |
| Phe (F) | Trp; Leu; Val; Ile; Ala; Tyr |
| Pro (P) | Ala |
| Ser (S) | Thr |
| Thr (T) | Val; Ser |
| Trp (W) | Tyr; Phe |
| Tyr (Y) | Trp; Phe; Thr; Ser |
| Val (V) | Ile; Leu; Met; Phe; Ala; Norleucine |

[0385] In some embodiments, single-domain antibodies (e.g., VHH) of the present disclosure comprise one or more modifications that reduce binding of the single-domain antibodies (e.g., VHH) by pre-existing antibodies found in human blood or serum. In some embodiments, single-domain antibodies (e.g., VHHs) of the present disclosure are modified by mutation of amino acid position 11, for example Leu11Glu (L11E), Leu11Lys (L11K), or Leu11Val (L11V). In one embodiment, a single-domain antibody (e.g., VHH) of the present disclosure may comprise a valine (V) at amino acid position 11 and a leucine (L) at amino acid position 89 (according to Kabat numbering). As another example, a single-domain antibody (e.g., VHH) of the present disclosure may comprise an extension of 1 to 5 (naturally occurring) amino acids, such as a single alanine (A) extension, at the C-terminus of the single-domain antibody (e.g., VHH). The C-terminus of a VHH is normally VTVSS (SEQ ID NO: 4031). In one embodiment, a single-domain antibody (e.g., VHH) of the present disclosure comprises a lysine (K) or glutamine (Q) at position 110 (according to Kabat numbering). In another embodiment, a single-domain antibody (e.g., VHH) of the present disclosure comprises a lysine (K) or glutamine (Q) at position 112 (according to Kabat numbering). Accordingly, the C-terminus of a single-domain antibody (e.g., VHH) can be any one of VKVSS (SEQ ID NO: 4032), VQVSS (SEQ ID NO: 4033), VTVKS (SEQ ID NO: 4034), VTVQS (SEQ ID NO: 4035), VKVKS (SEQ ID NO: 4036), VKVQS (SEQ ID NO: 4037), VQVKS (SEQ ID NO: 4038), or VQVQS (SEQ ID NO: 4039). In another embodiment, a single-domain antibody (e.g., VHH) of the present disclosure comprises a valine (V) at amino acid position 11 and a leucine (L) at amino acid position 89 (according to Kabat numbering), optionally a lysine (K) or glutamine (Q) at position 110 (according to Kabat numbering) and an extension of 1 to 5 (naturally occurring) amino acids, such as a single alanine (A) extension at the C-terminus of the single-domain antibody (e.g., VHH) (such that the C-terminus of the single-domain antibody (e.g., VHH) for example has the sequence VTVSSA (SEQ ID NO: 4040), VKVSSA (SEQ ID NO: 4041) or VQVSSA (SEQ ID NO: 4042). In further embodiments, single-domain antibodies (e.g., VHH) of the present disclosure are modified by changes in carboxy-terminal region, for example to a terminal sequence having the sequence GQGTLVTVKPGG (SEQ ID NO: 4043) or GQGTLVTVEPGG (SEQ ID NO; 4044) or modification thereof. Additional modification to reduce binding by pre-existing antibodies in human serum can be found in e.g., WO2012/175741, WO2015/173325, WO2016/150845, WO2011/003622, WO2013/024059; U.S. Pat. Nos. 11,426,468, 10,526,397, which are incorporated herein by reference in their entities.

[0386] In one embodiment, a single-domain antibody (e.g., VHH) of the present disclosure comprises at the carboxy-terminus starting from position 111 according to Chothia the amino acid sequence VAGG (SEQ ID NO: 4697) or VPAG (SEQ ID NO: 4698). In one embodiment, a single-domain antibody (e.g., VHH) of the present disclosure comprises at the carboxy-terminus starting from position 111 according to Chothia the amino acid sequence VAGG (SEQ ID NO: 4697). In one embodiment, a single-domain antibody (e.g., VHH) of the present disclosure comprises at the carboxy-terminus starting from position 111 according to Chothia the amino acid sequence VPAG (SEQ ID NO: 4698).

[0387] In some embodiments, a single-domain antibody (e.g., VHH) of the present disclosure comprises an amino acid sequence selected from any one of SEQ ID NOs: 4, 7, 11, 15, 19, 23, 27, 31, 35, 39, 43, 47, 4064, 4068, 4072, 4521, 93-640, 4079-4125 2805-3363, 4359-4420, and 4605-4628, or a sequence having at least 75% identity thereto, wherein the amino acid sequence at the carboxy-terminus starting from position 111 according to Chothia comprises VAGG (SEQ ID NO: 4697) or VPAG (SEQ ID NO: 4698).

[0388] In some embodiments, a single-domain antibody (e.g., VHH) of the present disclosure comprises an amino acid sequence selected from any one of SEQ ID NOs: 4, 7, 11, 15, 19, 23, 27, 31, 35, 39, 43, 47, 4064, 4068, 4072, and 4521, or a sequence having at least 75% identity thereto, wherein the amino acid sequence at the carboxy-terminus starting from position 111 according to Chothia comprises VAGG (SEQ ID NO: 4697) or VPAG (SEQ ID NO: 4698).

[0389] In some embodiments, a single-domain antibody (e.g., VHH) of the present disclosure comprises an amino acid sequence selected from any one of SEQ ID NOs: 81-92, 4076-4078, 4523, 4526, 4529, 4532, 4731-4734, 641-1127, and 4126-4172, or a sequence having at least 75% identity thereto, wherein the amino acid sequence at the carboxy-terminus starting from position 111 according to Chothia comprises VAGG (SEQ ID NO: 4697) or VPAG (SEQ ID NO: 4698).

[0390] In some embodiments, a single-domain antibody (e.g., VHH) of the present disclosure comprises an amino acid sequence selected from any one of SEQ ID NOs: 81-92, 4076-4078, 4523, 4526, 4529, 4731-4734, and 4532 or a sequence having at least 75% identity thereto, wherein the amino acid sequence at the carboxy-terminus starting from position 111 according to Chothia comprises VAGG (SEQ ID NO: 4697) or VPAG (SEQ ID NO: 4698).

[0391] In some embodiments, single-domain antibodies (e.g., VHH) of the present disclosure are modified to enhance binding to staphylococcal protein A (SpA) or streptococcal protein G (SpG). Binding of SpA and SpG to antibodies or antibody fragments can be useful in the manufacturing process of the antibodies or antibody fragments. The high-affinity interaction of the IgG Fc region with SpA and SpG has been extensively exploited and became the gold standard for monoclonal antibody purification (Björck and Kronvall, 1984). Other non-Fc containing antibody fragments, such as VHHs and Fabs do not have the capacity to bind to SpA or SpG via their Fc regions. However, sequence-dependent interaction with SpA has been demonstrated for these non-Fc containing antibody fragments (Graille et al., 2000; Henry et al., 2016). This characteristic circumvents potential use of affinity tags fused to the drug candidate for affinity chromatography that have the disadvantage as being regarded as a sequence liability, as it may impact protein immunogenicity as well as protein structure and stability and could compromise functionality. The interaction of the single-domain antibodies (e.g., VHH) to SpA relies on an alternative binding mode, with a 1-5 μM affinity, which is comparable to the 0.2-3 μM measured for VH-SpA interactions (To et al., JBC, 2005; Henry et al., Plos One, 2016).

[0392] In some embodiments, single-domain antibodies (e.g., VHH) of the present disclosure have, or are modified to have a SpA-binding motif. For example, The VHH-SpA interface has been mapped to thirteen residues, which cluster within the framework at the back side of the V-body, distant to the CDRs (Graille et al., 2000, Henry et al., 2016). In the absence of a VHH-SpA co-structure, superposition of a SpA-Fab crystal structure and a VHH allows for visualizing the binding mode. Based on a structural and functional analysis, the thirteen residues of the VHH-SpA interface have been characterized to be intolerant to substitutions (residues Gly15, Arg19, Tyr59, Gly65, and Arg66), tolerant to specific substitutions (residues Thr/Lys/Arg57, Thr68, Gln81, Asn82a, and Ser82b) or generally tolerant to a variety of substitutions (residues Ser17, Lys64, and Ser70) (all residue positions refer to Kabat numbering) (Henry et al., Plos One, 2016). Thus, a SpA-binding motif included in a single-domain antibody (e.g., VHH) of the present disclosure may include one or more, or all of the thirteen residues.

[0393] In some embodiments, single-domain antibodies (e.g., VHH) of the present disclosure comprise one or more modifications at N-terminus to prevent formation of a pyroglutamate and product heterogeneity. In one embodiment, the amino acid residue Glu at the first position of the single-domain antibodies (e.g., VHH) is replaced with Asp (E1D).

[0394] In some embodiments, a single-domain antibody (e.g., VHH) of the present disclosure comprises an amino acid sequence selected from any one of SEQ ID NOs: 4, 7, 11, 15, 19, 23, 27, 31, 35, 39, 43, 47, 4064, 4068, 4072, 4521, 93-640, 4079-4125 2805-3363, 4359-4420, and 4605-4628, or a sequence having at least 75% identity thereto, wherein the amino acid residue Glu at the first position of the single-domain antibody (e.g., VHH) is replaced with Asp (E1D).

[0395] In some embodiments, a single-domain antibody (e.g., VHH) of the present disclosure comprises an amino acid sequence selected from any one of SEQ ID NOs: 4, 7, 11, 15, 19, 23, 27, 31, 35, 39, 43, 47, 4064, 4068, 4072, and 4521, or a sequence having at least 75% identity thereto, wherein the amino acid residue Glu at the first position of the single-domain antibody (e.g., VHH) is replaced with Asp (E1D).

[0396] In some embodiments, a single-domain antibody (e.g., VHH) of the present disclosure comprises an amino acid sequence selected from any one of SEQ ID NOs: 81-92, 4076-4078, 4523, 4526, 4529, 4532, 4731-4734, 641-1127, and 4126-4172, or a sequence having at least 75% identity thereto, wherein the amino acid residue Glu at the first position of the single-domain antibody (e.g., VHH) is replaced with Asp.

[0397] In some embodiments, a single-domain antibody (e.g., VHH) of the present disclosure comprises an amino acid sequence selected from any one of SEQ ID NOs: 81-92, 4076-4078, 4523, 4526, 4529, 4731-4734, and 4532 or a sequence having at least 75% identity thereto, wherein the amino acid residue Glu at the first position of the single-domain antibody (e.g., VHH) is replaced with Asp (E1D).

### Alternative Protein Scaffolds

[0398] In some embodiments, anti-TNFR2 antigen-binding proteins of the present disclosure can adopt an alternative protein scaffold. Such alternative protein scaffold may be a single chain polypeptidic framework, optionally with a reduced size (e.g., less than about 200 amino acids), that contains a highly structured core associated with variable domains of high conformational tolerance allowing insertions, deletions, or other substitutions. Such antigen-binding proteins may be generated by grafting CDRs or variable regions described herein onto a suitable protein scaffold. The structure of alternative scaffolds may vary, but preferably are of human origin for those developed as therapeutics.

[0399] Alternative protein scaffolds of the present disclosure can be based either on a conventional immunoglobulin (Ig) backbone, or are derived from a completely unrelated protein. These variable domains can be modified to create novel binding interfaces toward any targeted antigen. In some embodiments, an alternative protein scaffold of the present disclosure can be derived from Protein A, e.g., the Z-domain thereof (affibodies), ImmE7 (immunity proteins), BPTI/APPI (Kunitz domains), Ras-binding protein AF-6 (PDZ-domains), charybdotoxin (Scorpion toxin), CTLA-4, Min-23 (knottins), lipocalins (anticalins), neokarzinostatin, a fibronectin domain (used in “adnectin”), an ankyrin repeat (AR) domain (used in “DARPins”), avidity multimers (also known as “avimers”), or thioredoxin (Skerra, A., Curr. Opin. Biotechnol, 18:295-304 (2005); Hosse et al., Protein Sci. 15:14-27 (2006); Nicaise et al., Protein Sci. 13:1882-1891 (2004); Nygren and Uhlen, Curr. Opin. Struc. Biol. 7:463-469 (1997), all of which are hereby incorporated by reference in their entirety).

[0400] Anticalins are a suitable type of non-lg based alternative scaffolds for use in the antigen-binding molecules of the present disclosure. Anticalins are a class of engineered ligand-binding proteins that are based on the lipocalin scaffold. Lipocalins are a family of proteins that transport small hydrophobic molecules such as steroids, bilins, retinoids, and lipids. Lipocalins have limited sequence homology, but share a common tertiary structure architecture based on eight antiparallel β-barrels. Lipocalins contain four exposed loops built on the rigid β-barrel structure. Exemplary anticalin proteins that are commonly used are about a size of about 180 amino acids and a mass of about 20 kDa.

[0401] DARPins are another suitable non-Ig based alternative scaffold that can be used in the antigen-binding molecules of the present disclosure. DARPins are genetically engineered antibody mimetic proteins typically exhibiting highly specific and high-affinity target protein binding. They are derived from natural ankyrin repeat (AR) proteins, which usually contain a 33 amino acid protein motif consisting of two α-helices separated by loops, which repeats mediate protein-protein interactions. DARPins can be generated using combinatorial AR libraries constructed based on the 33 amino acid AR motif with seven randomized positions. DARPin libraries can be screened using ribosome display, and library members typically are well produced in Escherichia coli, do not aggregate, and display high thermodynamic stability. Preferably, DARPins contain two to four of these motifs flanked by N- and C-terminal capping motifs to shield hydrophobic regions and allow increased solubility.

[0402] The avimer structure can also be used as a protein backbone to generate a suitable non-Ig based alternative scaffold. Avimers typically consist of two or more peptide sequences of 30 to 35 amino acids each, connected by peptide linker. The individual sequences are derived from A-domains of various membrane receptors and have a rigid structure, stabilized by disulfide bridges and calcium. Each A-domain can bind to a certain epitope of the target protein. The combination of domains binding to different epitopes of the same protein increases affinity to this protein, an effect known as avidity.

[0403] Proteins derived from fibronectin III (FN3) domains can also be used to generate a suitable non-Ig based alternative scaffold (also known as “monobody”). For example, the tenth fibronectin type III domain (FN10) of human fibronectin corresponds to a β-sandwich with seven β-strands and three connecting loops showing structural homologies to Ig domains without disulfide bridges. In some cases, the connecting loops of FN10, each about 15 to 21 amino acids in length, can be randomized and the domains displayed on both phage and yeast to select for a scaffold with the desirable properties. Adnectins™ is an exemplary scaffold generated using 10^{th} FN3 domains randomized and displayed in this way. Another exemplary scaffold comprising FN3 domains is a Centyrin™. Centryrins™ contain the consensus sequence of FN3 domains of human Tenascin C (TNC), which is found in the extracellular matrix of various tissues. Centyrin™ scaffolds have loops that have structural homology to antibody variable domains (i.e., CDR1, CDR2 and CDR3), and are small (about 10 kDa), simple, and highly stable single domain proteins that do not contain cysteine, disulfides, or glycosylated residues. Centyrin™ possess excellent biophysical properties such as stability to heat, pH, denaturant and organic solvents, reversible unfolding and monodispersity. Another recent exemplary FN3-based scaffold that can be used in the present disclosure is fluctuation-regulated affinity proteins (FLAPs), as described in See et al., 2020. Biotechnology Journal 15 (12): e2000078, which is incorporated herein by reference in its entirety.

### Fusion Proteins and Conjugates

[0404] In one aspect, provided herein are fusion proteins and conjugates comprising at least one anti-TNFR2 antigen-binding protein (e.g., antibody such as a single-domain antibody) linked, directly or indirectly, to one or more additional domains or moieties. In some embodiments, the fusion protein or conjugate of the present disclosure comprises a single polypeptide. In other embodiments, the fusion protein or conjugate of the present disclosure comprises more than one polypeptide. In some embodiments, the fusion protein or conjugate of the present disclosure comprises two polypeptides.

[0405] In some embodiments, the fusion protein or conjugate of the present disclosure comprises at least one anti-TNFR2 antigen-binding protein (e.g., antibody such as a single-domain antibody) described herein. In some embodiments, the fusion protein or conjugate is multivalent. For example, the fusion protein or conjugate of the present disclosure may be at least bivalent, but can also be e.g., trivalent, tetravalent, pentavalent, hexavalent, etc. The terms “bivalent”, “trivalent”, “tetravalent”, “pentavalent”, or “hexavalent” all fall under the term “multivalent” and indicate the presence of two, three, four, five or six binding units (e.g., VHHs), respectively.

[0406] In certain embodiments, the fusion protein or conjugate is multispecific. For example, in some cases, the one or more additional domain or moieties may be one or more additional binding domain that binds to one or more further antigen or protein. The fusion protein or conjugate of the present disclosure may be, for example, bispecific, trispecific, tetraspecific, pentaspecific, etc. The terms “bispecific”, “trispecific”, “tetraspecific”, “pentaspecific”, etc., all fall under the term “multispecific” and refer to binding to two, three, four, five, etc., different target molecules, respectively.

[0407] When two or more anti-TNFR2 antigen-binding proteins are included in a fusion protein or conjugate, the two or more anti-TNFR2 antigen-binding proteins may comprise the same sequence or may comprise different sequences. In such embodiments, the two or more anti-TNFR2 antigen-binding proteins may bind to the same epitope on TNFR2 or different epitopes on TNFR2. For example, a fusion protein or conjugate of the present disclosure may be biparatopic, e.g., if two VHHs bind two different epitopes on TNFR2.

[0408] Exemplary designs of multivalent anti-TNFR2 fusion constructs comprising two or more anti-TNFR2 binding units (e.g., VHHs) are shown in FIG. 30.

### Fusion or Conjugation to Fc Regions

[0409] In some embodiments, a fusion protein or conjugate of the present disclosure comprises at least one anti-TNFR2 antigen-binding protein (e.g., antibody such as a single-domain antibody) provided herein operably linked to a dimerization domain such as an immunoglobulin Fc region. An immunoglobulin Fc region may be linked indirectly or directly to the at least one anti-TNFR2 antigen-binding protein (e.g., antibody such as a single-domain antibody), In some embodiments, a fusion protein or conjugate of the present disclosure comprises one, two, three, four, five, six or more anti-TNFR2 antigen-binding proteins provided herein operably linked to an Fc region.

[0410] A “Fc region” as used herein refers to a portion of a heavy chain constant region comprising CH2 and CH3. In some embodiments, an Fc region comprises a hinge, CH2, and CH3. In various embodiments, when an Fc region comprises a hinge, the hinge can mediate dimerization between two Fc-containing polypeptides. In various embodiments, an Fc region included in a fusion protein or conjugate of the present disclosure is a human immunoglobulin Fc region, or is derived from a human immunoglobulin Fc region. In some embodiments, the immunoglobulin Fc region is of IgG, IgE, IgM, IgD, IgA or IgY isotype. In some embodiments, the immunoglobulin Fc region is an IgG isotype, such as IgG1, IgG2, IgG3, or IgG4 subclass. The immunoglobulin Fc region may comprise a variant or fragment of a native IgG Fc region.

[0411] A native Fc region typically possesses an effector function, including but not limited to, Fc receptor binding; Clq binding and complement dependent cytotoxicity (CDC); Fc receptor binding; antibody-dependent cell-mediated cytotoxicity (ADCC); phagocytosis; down regulation of cell surface receptors (for example B-cell receptor); and B-cell activation, etc. Such effector functions generally require the Fc region to be combined with a binding domain (for example, an antibody variable domain) and can be assessed using various assays.

[0412] In some embodiments, a fusion protein or conjugate of the present disclosure can comprise a dimer of Fc regions. In some embodiments, an Fc region mediates dimerization of the TNFR2-binding units at physiological conditions, such as when expressed from a cell, such that a dimer is formed that doubles the number of TNFR2 binding units. For example, a fusion polypeptide comprising one VHH domain that binds TNFR2 and an Fc region is monovalent as a monomer, but the Fc region can mediate dimerization; as a result, the fusion protein is bivalent (i.e., having two anti-TNFR2 VHH domains per molecule). Similarly, in some embodiments, two anti-TNFR2 VHH domains (2×) are fused to an IgG Fc region and as a result of dimerization, the fusion protein is tetravalent (I.e., having four anti-TNFR2 VHH domains per molecule). In some embodiments, three anti-TNFR2 VHH domain (3×) are fused to an IgG Fc region and as a result of dimerization, the fusion protein is hexavalent (i.e., having six anti-TNFR2 VHH domains per molecule).

[0413] In some embodiments, a fusion protein or conjugate of the present disclosure may comprise two polypeptide chains, each polypeptide chain having the following structure: (anti-TNFR2 VHH) n-Linker-Fc, wherein n can be any integral number (e.g., 1, 2, 3, 4, 5, etc). When n≥2, each anti-TNFR2 VHH may be optionally operably linked to another anti-TNFR2 VHH via a linker.

[0414] In some embodiments, a fusion protein or conjugate of the present disclosure may comprise two polypeptide chains, each polypeptide chain having the following structure: (anti-TNFR2 VHH) n-Linker-Fc-(anti-TNFR2 VHH) m, wherein n and m can independently be any integral number (e.g., 1, 2, 3, 4, 5, etc). When n≥2 or m≥2, each anti-TNFR2 VHH may be optionally operably linked to another anti-TNFR2 VHH via a linker.

[0415] In some embodiments, a fusion protein or conjugate of the present disclosure is bivalent. In some embodiments, the bivalent fusion protein or conjugate of the disclosure comprises two polypeptide chains, each polypeptide chain having the following structure: (anti-TNFR2 VHH)-Linker-Fc.

[0416] In some embodiments, a fusion protein or conjugate of the present disclosure is tetravalent. In some embodiments, the tetravalent fusion protein or conjugate of the disclosure comprises two polypeptide chains, each polypeptide chain having the following structure: (anti-TNFR2 VHH)-Linker-(anti-TNFR2 VHH)-Linker-Fc. In some embodiments, the tetravalent fusion protein or conjugate of the disclosure comprises two polypeptide chains, each polypeptide chain having the following structure: (anti-TNFR2 VHH)-Linker-Fc-Linker-(anti-TNFR2 VHH). The multiple linkers used in the fusion protein are not necessarily the same.

[0417] In some embodiments, a fusion protein or conjugate of the disclosure is hexavalent. In some embodiments, the hexavalent fusion protein or conjugate of the disclosure comprises two polypeptide chains, each polypeptide chain having the following structure: (anti-TNFR2 VHH)-Linker-(anti-TNFR2 VHH)-Linker-(anti-TNFR2 VHH)-Linker-Fc. In some embodiments, the hexavalent fusion protein or conjugate of the disclosure comprises two polypeptide chains, each polypeptide chain having the following structure: (anti-TNFR2 VHH)-Linker-(anti-TNFR2 VHH)-Linker-Fc-linker-(anti-TNFR2 VHH). In some embodiments, the hexavalent fusion protein or conjugate of the disclosure comprises two polypeptide chains, each polypeptide chain having the following structure: (anti-TNFR2 VHH)-Linker-Fc-Linker-(anti-TNFR2 VHH)-Linker-(anti-TNFR2 VHH). The multiple linkers used in the fusion protein are not necessarily the same.

[0418] In some embodiments, the CH3 domain of the Fc region can be used as homodimerization domain, such that the resulting fusion protein may be formed from two identical polypeptides. In other cases, the CH3 dimer interface region of the Fc region can be mutated to enable heterodimerization. For example, a heterodimerization domain can be incorporated into the fusion protein such that the construct is a heterodimeric fusion protein.

[0419] When a dimer of Fc regions is used in a fusion protein or conjugate of the present disclosure, the first and second Fc regions may be of the same IgG isotype such as, e.g., IgG1/IgG1, IgG2/IgG2, IgG4/IgG4. Alternatively, the first and second Fc regions may be of different IgG isotypes such as, e.g., IgG1/IgG2, IgG1/IgG4, IgG2/IgG4, etc.

[0420] In some embodiments, the Fc region included in a fusion protein or conjugate of the present disclosure can be mutated or modified. In some embodiments, the mutations include one or more amino acid substitutions to reduce an effector function of the Fc region. Various examples of mutations to Fc regions to alter, such as reduce, effector function are known, including any as described below. In general, the numbering of the residues in an immunoglobulin heavy chain or portion thereof, such as an Fc region, is according to the EU index as in Kabat et al., Sequences of Proteins of Immunological Interest, 5th Ed. Public Health Service, National Institutes of Health, Bethesda, Md. (1991).

[0421] In some embodiments, the human IgG Fc region is modified to alter antibody-dependent cellular cytotoxicity (ADCC) and/or complement-dependent cytotoxicity (CDC). Non-limiting examples of amino acid modifications that can alter ADCC and/or CDC are described in Alegre et al, 1992 J Immunol, 148:3461-3468; Idusogie et al., 2001 J Immunol, 166(4): 2571-5; Shields et al., 2001 JBC, 276(9): 6591-6604; Lazar et al., 2006 PNAS, 103(11): 4005-4010; Stavenhagen et al., 2007 Cancer Res, 67(18): 8882-8890; Natsume et al., 2008 Cancer Res, 68(10): 3863-72; Stavenhagen et al., 2008 Advan. Enzyme Regul., 48: 152-164; Moore et al., 2010 mAbs, 2(2): 181-189; and Kaneko and Niwa, 2011 Biodrugs, 25(1):1-11, each of which is incorporated herein by reference in its entirety.

[0422] In some embodiments, an Fc region included in a fusion protein or conjugate of the present disclosure exhibits reduced effector functions (such as CDC and ADCC), Various in vitro and/or in vivo cytotoxicity assays can be conducted to confirm the reduction/depletion of CDC and/or ADCC activities. For example, Fc receptor (FcR) binding assays can be conducted to ensure that the fusion protein construct and/or cleaved components thereof lack FcγR binding (hence likely lacking ADCC activity), but retains FcRn binding ability. The primary cells for mediating ADCC are NK cells which express FcγRIII only, whereas monocytes express FcγRI, FcγRII and FcγRIII. Non-limiting examples of in vitro assays to assess ADCC activity of a molecule of interest are described in e.g., U.S. Pat. Nos. 5,500,362; 5,821,337; Hellstrom, et al., Proc. Nat'l Acad. Sci. USA 83:7059-7063 (1986); and Hellstrom et al., Proc. Nat'l Acad. Sci. USA 82:1499-1502 (1985); Bruggemann. et al., J. Exp. Med. 166:1351-1361 (1987). Alternatively, non-radioactive assay methods may be employed, such as ACTI™ non-radioactive cytotoxicity assay for flow cytometry or CytoTox96™ non-radioactive cytotoxicity assay. Useful effector cells for such assays include peripheral blood mononuclear cells (PBMC) and Natural Killer (NK) cells. Alternatively, or additionally, ADCC activity of the molecule of interest may be assessed in vivo, e.g., in an animal model such as that disclosed in Clynes et al. Proc. Nat'l Acad. Sci. USA 95:652-656 (1998). C1q binding assays may also be carried out to confirm that the fusion protein construct or cleaved components thereof is unable to bind C1q and hence lacks CDC activity (see, e.g., C1q and C3c binding ELISA in WO 2006/029879 and WO 2005/100402). To assess complement activation, a CDC assay may be performed (see, e.g., Gazzano-Santoro et al., J. Immunol. Methods 202:163 (1996); Cragg, M. S. et al., Blood 101:1045-1052 (2003); and Cragg, M. S. and M. J. Glennie, Blood 103:2738-2743 (2004)). FcRn binding and in vivo clearance/half-life determinations can also be performed using methods known in the art (see, e.g., Petkova, S. B. et al., Int'l. Immunol. 18 (12): 1759-1769 (2006).

[0423] Examples of mutations that enhance ADCC include modification at Ser239 and Ile332, for example Ser239Asp and Ile332Glu (S239D, 1332E). Examples of mutations that enhance CDC include modifications at Lys326 and Glu333. In some embodiments, the Fc region is modified at one or both of these positions, for example Lys326Ala and/or Glu333Ala (K326A and E333A) using the Kabat numbering system.

[0424] In some embodiments, the Fc region of the fusion protein is altered at one or more of the following positions to reduce Fc receptor binding: Leu 234 (L234), Leu235 (L235), Asp265 (D265), Asp270 (D270), Ser298 (S298), Asn297 (N297), Asn325 (N325) or Ala327 (A327) or Pro329 (P329). For example, Leu 234Ala (L234A), Leu235Ala (L235A), Leu235Glu (L235E), Asp265Asn (D265N), Asp265Ala (D265A), Asp270Asn (D270N), Ser298Asn (S298N), Asn297Ala (N297A), Pro329Ala (P329A) or Pro239Gly (P329G), Asn325Glu (N325E) or Ala327Ser (A3275). In some embodiments, modifications within the Fc region reduce binding to Fc-receptor-gamma receptors (FcγRs) while have minimal impact on binding to the neonatal Fc receptor (FcRn).

[0425] In some embodiments, the human IgG1 Fc region is modified at amino acid Asn297 (Kabat Numbering) to prevent glycosylation of the fusion protein, e.g., Asn297Ala (N297A) or Asn297Asp (N297D). In some embodiments, the Fc region of the fusion protein is modified at amino acid Leu235 (Kabat Numbering) to alter Fc receptor interactions, e.g., Leu235Glu (L235E) or Leu235Ala (L235A). In some embodiments, the Fc region of the fusion protein is modified at amino acid Leu234 (Kabat Numbering) to alter Fc receptor interactions, e.g., Leu234Ala (L234A). In some embodiments, the Fc region of the fusion protein is modified at amino acid Leu234 (Kabat Numbering) to alter Fc receptor interactions, e.g., Leu235Glu (L235E). In some embodiments, the Fc region of the fusion protein is altered at both amino acids 234 and 235, e.g., Leu234Ala and Leu235Ala (L234A/L235A) or Leu234Val and Leu235Ala (L234V/L235A). In some embodiments, the Fc region of the fusion protein is altered at amino acids at 234, 235, and 297, e.g., Leu234Ala, Leu235Ala, Asn297Ala (L234A/L235A/N297A). In some embodiments, the Fc region of the fusion protein is altered at amino acids at 234, 235, and 329, e.g., Leu234Ala, Leu235Ala, Pro239Ala (L234A/L235A/P329A). In some embodiments, the Fc region of the fusion protein is modified at amino acid Asp265 (Kabat Numbering) to alter Fc receptor interactions, e.g Asp265Ala (D265A). In some embodiments, the Fc region of the fusion protein is modified at amino acid Pro329 (Kabat Numbering) to alter Fc receptor interactions, e.g., Pro329Ala (P329A) or Pro329Gly (P329G). In some embodiments, the Fc region of the fusion protein is altered at both amino acids 265 and 329, e.g., Asp265Ala and Pro329Ala (D265A/P329A) or Asp265Ala and Pro329Gly (D265A/P329G). In some embodiments, the Fc region of the fusion protein is altered at amino acids at 234, 235, and 265, e.g., Leu234Ala, Leu235Ala, Asp265Ala (L234A/L235A/D265A). In some embodiments, the Fc region of the fusion protein is altered at amino acids at 234, 235, and 329, e.g., Leu234Ala, Leu235Ala, Pro329Gly (L234A/L235A/P329G). In some embodiments, the Fc region of the fusion protein is altered at amino acids at 234, 235, 265 and 329, e.g., Leu234Ala, Leu235Ala, Asp265Ala, Pro329Gly (L234A/L235A/D265A/P329G). In some embodiments, the Fc region of the fusion protein is altered at Gly235 to reduce Fc receptor binding. For example, wherein Gly235 is deleted from the fusion protein. In some embodiments, the human IgG1 Fc region is modified at amino acid Gly236 to enhance the interaction with CD32A, e.g., Gly236Ala (G236A). In some embodiments, the human IgG1 Fc region lacks Lys447 (EU index of Kabat et al 1991 Sequences of Proteins of Immunological Interest).

[0426] In some embodiments, the Fc region of the fusion protein is altered at amino acids at 234, 235, and 236, e.g., Leu234Gly, Leu235Ser, Gly236Arg (L234G/L235S/G236R). In some embodiments, the Fc region of the fusion protein is altered at amino acids at 234, 235, and 236, e.g., Leu234Ser, Leu235Thr, Gly236Arg (L234S/L235T/G236R). In some embodiments, the Fc region of the fusion protein is altered at amino acids at 234, 235, and 236, e.g., Leu234Ser, Leu235Val, Gly236Arg (L234S/L235V/G236R). In some embodiments, the Fc region of the fusion protein is altered at amino acids at 234, 235, and 236, e.g., Leu234Thr, Leu235Gln, Gly236Arg (L234T/L235Q/G236R). In some embodiments, the Fc region of the fusion protein is altered at amino acids at 234, 235, and 236, e.g., Leu234Thr, Leu235Thr, Gly236Arg (L234T/L235T/G236R). In some embodiments, the Fc region of the fusion protein fusion protein is altered at amino acids at 234, 235, and 329, e.g., Leu234Thr, Leu235Thr, Pro329Gly (L234A/L235A/P329G). In some embodiments, the Fc region of the fusion protein is altered at amino acids at 252, 254, and 256, e.g., Met252Tyr, Ser254Thr, Thr256Glu (M252Y/S254T/T256E).

[0427] In some embodiments, the Fc region of the fusion protein is lacking an amino acid at one or more of the following positions to reduce Fc receptor binding: Glu233 (E233), Leu234 (L234), or Leu235 (L235). In some embodiments, the Fc region of the fusion protein is lacking an amino acid at one or more of the following positions Glu233 (E233), Leu234 (L234), or Leu235 (L235) and is modified at one or more of the Asp265 (D265), Asn297 (N297), or Pro329 (P329) to reduce Fc receptor binding. For example, an Fc region included in a TNFR2 binding polypeptide is derived from a human Fc domain, and comprises a three amino acid deletion in the lower hinge corresponding to IgG1 E233, L234, and L235. In some embodiments, such Fc polypeptides do not engage FcγRs and thus are referred to as “effector silent” or “effector null.” For example, Fc deletion of these three amino acids reduces the complement protein C1q binding. In some embodiments, a polypeptide with an Fc region with Fc deletion of these three amino acids retains binding to FcRn and therefore has extended half-life and transcytosis associated with FcRn mediated recycling.

[0428] In one embodiment, the immunoglobulin Fc region of the fusion protein is a variant of human IgG1 Fc region, having an amino acid sequence:

IgG1 L234A, L235A (also known as ″LALA″ variant) (mutations bolded in the sequence below)
(SEQ ID NO: 4045)
DKTHTCPPCPAPEAAGGPSVFLFPPKPKDTLMISRTPEVTCVVVDVSHEDPEVKFNWYVDGVEVHNAKTKPREEQYNS
TYRVVSVLTVLHQDWLNGKEYKCKVSNKALPAPIEKTISKAKGQPREPQVYTLPPSREEMTKNQVSLTCLVKGFYPSDIA
VEWESNGQPENNYKTTPPVLDSDGSFFLYSKLTVDKSRWQQGNVFSCSVMHEALHNHYTQKSLSLSPG

[0429] In one embodiment, the immunoglobulin Fc region of the fusion protein is a variant of human IgG1 Fc region, having an amino acid sequence:

IgG1 L234A, L235A, and P329A (also known as ″LALAPA″ variant) (mutations bolded in the
sequence below)
(SEQ ID NO: 4046)
DKTHTCPPCPAPEAAGGPSVFLFPPKPKDTLMISRTPEVTCVVVDVSHEDPEVKFNWYVDGVEVHNAKTKPREEQYNS
TYRVVSVLTVLHQDWLNGKEYKCKVSNKALAAPIEKTISKAKGQPREPQVYTLPPSREEMTKNQVSLTCLVKGFYPSDIA
VEWESNGQPENNYKTTPPVLDSDGSFFLYSKLTVDKSRWQQGNVFSCSVMHEALHNHYTQKSLSLSPG

[0430] In one embodiment, the immunoglobulin Fc region of the fusion protein is a variant of human IgG1 Fc region, having an amino acid sequence:

IgG1 D265A, N297A and P329A (also known as ″DANAPA″ variant) (mutations bolded in the
sequence below)
(SEQ ID NO: 4047)
DKTHTCPPCPAPELLGGPSVFLFPPKPKDTLMISRTPEVTCVVVAVSHEDPEVKFNWYVDGVEVHNAKTKPREEQYAST
YRVVSVLTVLHQDWLNGKEYKCKVSNKALAAPIEKTISKAKGQPREPQVYTLPPSREEMTKNQVSLTCLVKGFYPSDIAV
EWESNGQPENNYKTTPPVLDSDGSFFLYSKLTVDKSRWQQGNVFSCSVMHEALHNHYTQKSLSLSPG

[0431] In one embodiment, the immunoglobulin Fc region of the fusion protein is a variant of human IgG1 Fc region, having an amino acid sequence:

IgG1 L234A, L235A, and G237A (also known as ″LALAGA″ variant) (mutations bolded in
the sequence below)
(SEQ ID NO: 4048)
DKTHTCPPCPAPEAAGAPSVFLFPPKPKDTLMISRTPEVTCVVVDVSHEDPEVKFNWYVDGVEVHNAKTKPREEQYNS
TYRVVSVLTVLHQDWLNGKEYKCKVSNKALPAPIEKTISKAKGQPREPQVYTLPPSREEMTKNQVSLTCLVKGFYPSDIA
VEWESNGQPENNYKTTPPVLDSDGSFFLYSKLTVDKSRWQQGNVFSCSVMHEALHNHYTQKSLSLSPG

[0432] In one embodiment, the immunoglobulin Fc region of the multispecific antigen-binding protein is a variant of human IgG1 Fc region, having an amino acid sequence:

IgG1 L234G/L235S/G236R (mutations bolded in the sequence below)
(SEQ ID NO: 4054)
DKTHTCPPCPAPEGSRGPSVFLFPPKPKDTLMISRTPEVTCVVVDVSHEDPEVKFNWYVDGVEVHNAKTKPREEQYNS
TYRVVSVLTVLHQDWLNGKEYKCKVSNKALPAPIEKTISKAKGQPREPQVYTLPPSREEMTKNQVSLTCLVKGFYPSDIA
VEWESNGQPENNYKTTPPVLDSDGSFFLYSKLTVDKSRWQQGNVFSCSVMHEALHNHYTQKSLSLSPG

[0433] In one embodiment, the immunoglobulin Fc region of the multispecific antigen-binding protein is a variant of human IgG1 Fc region, having an amino acid sequence:

IgG1 L234S/L235T/G236R (mutations bolded in the sequence below)
(SEQ ID NO: 4055)
DKTHTCPPCPAPESTRGPSVFLFPPKPKDTLMISRTPEVTCVVVDVSHEDPEVKFNWYVDGVEVHNAKTKPREEQYNST
YRVVSVLTVLHQDWLNGKEYKCKVSNKALPAPIEKTISKAKGQPREPQVYTLPPSREEMTKNQVSLTCLVKGFYPSDIAV
EWESNGQPENNYKTTPPVLDSDGSFFLYSKLTVDKSRWQQGNVFSCSVMHEALHNHYTQKSLSLSPG

[0434] In one embodiment, the immunoglobulin Fc region of the multispecific antigen-binding protein is a variant of human IgG1 Fc region, having an amino acid sequence:

IgG1 L234S/L235V/G236R (mutations bolded in the sequence below)
(SEQ ID NO: 4056)
DKTHTCPPCPAPESVRGPSVFLFPPKPKDTLMISRTPEVTCVVVDVSHEDPEVKFNWYVDGVEVHNAKTKPREEQYNS
TYRVVSVLTVLHQDWLNGKEYKCKVSNKALPAPIEKTISKAKGQPREPQVYTLPPSREEMTKNQVSLTCLVKGFYPSDIA
VEWESNGQPENNYKTTPPVLDSDGSFFLYSKLTVDKSRWQQGNVFSCSVMHEALHNHYTQKSLSLSPG

[0435] In one embodiment, the immunoglobulin Fc region of the multispecific antigen-binding protein is a variant of human IgG1 Fc region, having an amino acid sequence:

IgG1 L234T/L235Q/G236R (mutations bolded in the sequence below)
(SEQ ID NO: 4057)
DKTHTCPPCPAPETQRGPSVFLFPPKPKDTLMISRTPEVTCVVVDVSHEDPEVKFNWYVDGVEVHNAKTKPREEQYNS
TYRVVSVLTVLHQDWLNGKEYKCKVSNKALPAPIEKTISKAKGQPREPQVYTLPPSREEMTKNQVSLTCLVKGFYPSDIA
VEWESNGQPENNYKTTPPVLDSDGSFFLYSKLTVDKSRWQQGNVFSCSVMHEALHNHYTQKSLSLSPG

[0436] In one embodiment, the immunoglobulin Fc region of the multispecific antigen-binding protein is a variant of human IgG1 Fc region, having an amino acid sequence:

IgG1 L234T/L235T/G236R (mutations bolded in the sequence below)
(SEQ ID NO: 4058)
DKTHTCPPCPAPETTRGPSVFLFPPKPKDTLMISRTPEVTCVVVDVSHEDPEVKFNWYVDGVEVHNAKTKPREEQYNST
YRVVSVLTVLHQDWLNGKEYKCKVSNKALPAPIEKTISKAKGQPREPQVYTLPPSREEMTKNQVSLTCLVKGFYPSDIAV
EWESNGQPENNYKTTPPVLDSDGSFFLYSKLTVDKSRWQQGNVFSCSVMHEALHNHYTQKSLSLSPG

[0437] In one embodiment, the immunoglobulin Fc region of the multispecific antigen-binding protein is a variant of human IgG1 Fc region, having an amino acid sequence:

IgG1 L234A/L235A/P329G (mutations bolded in the sequence below)
(SEQ ID NO: 4059)
DKTHTCPPCPAPEAAGGPSVFLFPPKPKDTLMISRTPEVTCVVVDVSHEDPEVKFNWYVDGVEVHNAKTKPREEQYNS
TYRVVSVLTVLHQDWLNGKEYKCKVSNKALGAPIEKTISKAKGQPREPQVYTLPPSREEMTKNQVSLTCLVKGFYPSDIA
VEWESNGQPENNYKTTPPVLDSDGSFFLYSKLTVDKSRWQQGNVFSCSVMHEALHNHYTQKSLSLSPG

[0438] In one embodiment, the immunoglobulin Fc region of the multispecific antigen-binding protein is a variant of human IgG1 Fc region, having an amino acid sequence:

IgG1 M252Y/S254T/T256E (mutations bolded in the sequence below)
(SEQ ID NO: 4060)
DKTHTCPPCPAPELLGGPSVFLFPPKPKDTLYITREPEVTCVVVDVSHEDPEVKFNWYVDGVEVHNAKTKPREEQYNST
YRVVSVLTVLHQDWLNGKEYKCKVSNKALPAPIEKTISKAKGQPREPQVYTLPPSREEMTKNQVSLTCLVKGFYPSDIAV
EWESNGQPENNYKTTPPVLDSDGSFFLYSKLTVDKSRWQQGNVFSCSVMHEALHNHYTQKSLSLSPG

[0439] In some embodiments, the human IgG Fc region is modified to enhance FcRn binding. Examples of Fc mutations that enhance binding to FcRn are Met252Tyr, Ser254Thr, Thr256Glu (M252Y, S254T, T256E, respectively) (Kabat numbering, Dall'Acqua et al 2006, J. Biol Chem Vol. 281 (33) 23514-23524), Met428Leu and Asn434Ser (M428L, N434S) (Zalevsky et al 2010 Nature Biotech, Vol. 28 (2) 157-159), or Met252Ile, Thr256Asp, Met428Leu (M252I, T256D, M428L, respectively) (EU index of Kabat et al 1991 Sequences of Proteins of Immunological Interest).

[0440] In some embodiments, the Fc region lacks or has reduced fucose attached to the N-linked glycan-chain at N297. There are numerous ways to prevent fucosylation, including but not limited to production in a FUT8 deficient cell line; addition inhibitors to the mammalian cell culture media, for example Castanospermine; and metabolic engineering of the production cell line.

[0441] In some embodiments, the Fc domain included in a fusion protein or conjugate of the present disclosure is derived from a human Fc domain and comprises mutations M252Y and M428V. In some embodiments, the mutated or modified Fc polypeptide includes the following mutations: M252Y and M428L using the Kabat numbering system. In some embodiments, such mutations enhance binding to FcRn at the acidic pH of the endosome (near 6.5), while losing detectable binding at neutral pH (about 7.2), allowing for enhanced FcRn mediated recycling and extended half-life.

[0442] In some embodiments, the Fc domain included in a fusion protein or conjugate is derived from a human Fc domain and comprises mutations to induce heterodimerization. In some embodiments, such mutations include those referred to as “knob” and “hole” mutations. For example, having an amino acid modification within the CH3 domain at Thr366, which when replaced with a bulkier amino acid, e.g., Try (T366W), is able to preferentially pair with a second CH3 domain having amino acid modifications to less bulky amino acids at positions Thr366, Leu368, and Tyr407, e.g., Ser, Ala, and Val, respectively (T366S/L368A/Y407V). In some embodiments, the “knob” Fc domain comprises the mutation T366W. In some embodiments, the “hole” Fc domain comprises mutations T366S, L368A, and Y407V. Heterodimerization via CH3 modifications can be further stabilized by the introduction of a disulfide bond, for example by changing Ser354 to Cys (S354C) and Y349 to Cys (Y349C) on opposite CH3 domains (Reviewed in Carter, 2001 Journal of Immunological Methods, 248:7-15). In some embodiments, Fc domains used for heterodimerization comprise additional mutations, such as the mutation $354C on a first member of a heterodimeric Fc pair that forms an asymmetric disulfide with a corresponding mutation Y349C on the second member of a heterodimeric Fc pair. In some embodiments, one member of a heterodimeric Fc pair comprises the modification H435R or H435K to prevent protein A binding while maintaining FcRn binding. In some embodiments, one member of a heterodimeric Fc pair comprises the modification H435R or H435K, while the second member of the heterodimeric Fc pair is not modified at H435. In various embodiments, the hole Fc domain comprises the modification H435R or H435K (referred to as “hole-R” in some instances when the modification is H435R), while the knob Fc domain does not. In some instances, the hole-R mutation improves purification of the heterodimer over homodimeric hole Fc domains that may be present.

[0443] In some embodiments, the human IgG Fc region is modified to prevent dimerization. In these embodiments, the fusion proteins of the present disclosure are monomeric. For example, modification at residue Thr366 to a charged residue, e.g. Thr366Lys, Thr366Arg, Thr366Asp, or Thr366Glu (T366K, T366R, T366D, or T366E, respectively), prevents CH3-CH3 dimerization.

[0444] In some embodiments, the immunoglobulin Fc region of the fusion protein is of human IgG3 isotype, or a variant thereof. In one embodiment, the IgG3 Fc region is modified at amino acid Asn297 (Kabat Numbering) to prevent to glycosylation of the antibody, e.g., Asn297Ala (N297A) or Asn297Asp (N297D). In some embodiments, the human IgG3 Fc region is modified at amino acid 435 to extend the half-life, e.g., Arg435His (R435H). In some embodiments, the human IgG3 Fc region lacks Lys447 (EU index of Kabat et al 1991).

[0445] In some embodiments, the immunoglobulin Fc region of the fusion protein is of human IgG4 isotype, or a variant thereof. In one embodiment, the human IgG4 Fc region is modified at amino acid 235 to alter Fc receptor interactions, e.g., Leu235Glu (L235E). In some embodiments, the human IgG4 Fc region is modified at amino acid Asn297 (Kabat Numbering) to prevent to glycosylation of the antibody, e.g., Asn297Ala (N297A) or Asn297Asp (N297D). In some embodiments, the human IgG4 Fc region is lacks Lys447 (EU index of Kabat et al 1991).

[0446] In some embodiments, the IgG4 Fc region of the fusion protein is altered at amino acids at 228 and 235, e.g., Ser228Pro, Leu235Glu or Leu235Ala (S228P/L235E or S228P/L235A). In some embodiments, the IgG4 Fc region of the fusion protein is altered at amino acids at 228, 234 and 235, e.g., Ser228Pro, Phe234Ala, Leu235Glu or Leu235Ala (S228P/F234A/L235E or S228P/F234A/L235A). In some embodiments, the IgG4 Fc region of the fusion protein is altered at amino acids at 228, 235, and 329, e.g., Ser228Pro, Leu235Glu and P329G (S228P/L235E/P329G).

[0447] In one embodiment, the immunoglobulin Fc region of the fusion protein is a variant of human IgG4 Fc region, having an amino acid sequence:

IgG4 S228P, L235E (mutations bolded in the sequence below)
(SEQ ID NO: 4049)
ESKYGPPCPPCPAPEFEGGPSVFLFPPKPKDTLMISRTPEVTCVVVDVSQEDPEVQFNWYVDGVEVHNAKTKPREEQF
NSTYRVVSVLTVLHQDWLNGKEYKCKVSNKGLPSSIEKTISKAKGQPREPQVYTLPPSQEEMTKNQVSLTCLVKGFYPSD
IAVEWESNGQPENNYKTTPPVLDSDGSFFLYSRLTVDKSRWQEGNVFSCSVMHEALHNHYTQKSLSLSLGK

[0448] In one embodiment, the immunoglobulin Fc region of the fusion protein is a variant of human IgG4 Fc region, having an amino acid sequence:

IgG4 S228P, L235A (mutations bolded in the sequence below)
(SEQ ID NO: 4050)
ESKYGPPCPPCPAPEFAGGPSVFLFPPKPKDTLMISRTPEVTCVVVDVSQEDPEVQFNWYVDGVEVHNAKTKPREEQF
NSTYRVVSVLTVLHQDWLNGKEYKCKVSNKGLPSSIEKTISKAKGQPREPQVYTLPPSQEEMTKNQVSLTCLVKGFYPSD
IAVEWESNGQPENNYKTTPPVLDSDGSFFLYSRLTVDKSRWQEGNVFSCSVMHEALHNHYTQKSLSLSLGK

[0449] In one embodiment, the immunoglobulin Fc region of the fusion protein is a variant of human IgG4 Fc region, having an amino acid sequence:

IgG4 S228P, F234A, L235E (mutations bolded in the sequence below)
(SEQ ID NO: 4051)
ESKYGPPCPPCPAPEAEGGPSVFLFPPKPKDTLMISRTPEVTCVVVDVSQEDPEVQFNWYVDGVEVHNAKTKPREEQF
NSTYRVVSVLTVLHQDWLNGKEYKCKVSNKGLPSSIEKTISKAKGQPREPQVYTLPPSQEEMTKNQVSLTCLVKGFYPSD
IAVEWESNGQPENNYKTTPPVLDSDGSFFLYSRLTVDKSRWQEGNVFSCSVMHEALHNHYTQKSLSLSLGK

[0450] In one embodiment, the immunoglobulin Fc region of the fusion protein is a variant of human IgG4 Fc region, having an amino acid sequence:

IgG4 S228P, F234A, L235A (mutations bolded in the sequence below)
(SEQ ID NO: 4052)
ESKYGPPCPPCPAPEAAGGPSVFLFPPKPKDTLMISRTPEVTCVVVDVSQEDPEVQFNWYVDGVEVHNAKTKPREEQF
NSTYRVVSVLTVLHQDWLNGKEYKCKVSNKGLPSSIEKTISKAKGQPREPQVYTLPPSQEEMTKNQVSLTCLVKGFYPSD
IAVEWESNGQPENNYKTTPPVLDSDGSFFLYSRLTVDKSRWQEGNVFSCSVMHEALHNHYTQKSLSLSLGK

[0451] In one embodiment, the immunoglobulin Fc region of the fusion protein is a variant of human IgG4 Fc region, having an amino acid sequence:

IgG4 P329G, S228P, L235E (mutations bolded in the sequence below)
(SEQ ID NO: 4053)
ESKYGPPCPPCPAPEFEGGPSVFLFPPKPKDTLMISRTPEVTCVVVDVSQEDPEVQFNWYVDGVEVHNAKTKPREEQF
NSTYRVVSVLTVLHQDWLNGKEYKCKVSNKGLGSSIEKTISKAKGQPREPQVYTLPPSQEEMTKNQVSLTCLVKGFYPS
DIAVEWESNGQPENNYKTTPPVLDSDGSFFLYSRLTVDKSRWQEGNVFSCSVMHEALHNHYTQKSLSLSLGK

[0452] Additional IgG4 heavy chain modifications suitable for use in the fusion proteins or conjugates of the present disclosure include those described in Tables 1 and 2 of Dumet et al., mAbs, 11:8, 1341-1350, which is incorporated herein by reference in its entirety.

[0453] In some embodiments, the fusion protein or conjugate contains an immunoglobulin hinge region. In some embodiments, the hinge region serves as a linker to connect one or more TNFR2 binding units (e.g., VHHs) to the Fc region. In other embodiments, the fusion protein can comprise a linker in addition to the hinge region to connect the one or more TNFR2 binding units (e.g., VHHs) to the Fc region. The hinge region can be selected from any of the human IgG subclasses. For example, the fusion protein may contain a modified IgG1 hinge having the sequence of EPKSSDKTHTCPPC (SEQ ID NO: 3923), wherein the Cys220 that typically forms a disulfide bond with the C-terminal cysteine of the light chain is mutated to serine, e.g., Cys220Ser (C220S). In other embodiments, the fusion protein contains a truncated hinge having a sequence DKTHTCPPC (SEQ ID NO: 3924).

[0454] In some embodiments, the fusion protein or conjugate has a modified hinge from IgG4, which is modified to prevent or reduce strand exchange, e.g., Ser228Pro (S228P), having the sequence ESKYGPPCPPC (SEQ ID NO: 3925).

[0455] In alternative embodiments, a fusion protein or conjugate of the present disclosure may comprise sequences other than an Fc region to achieve multimerization (e.g., dimerization). For example, an amino acid sequence containing at least one cysteine residue may be included to facilitate dimerization of two polypeptides by formation of a disulfide bond between the two polypeptides. In some embodiments, such multimerizing domain may comprise one or more cysteine residues, or a short cysteine-containing peptide. Other multimerizing domains include peptides or polypeptides comprising or consisting of a leucine zipper, a helix-loop motif, or a coiled-coil motif.

[0456] Fc mutations suitable for use in the fusion proteins disclosed herein are also discussed in, e.g., Wilkinson et al., Fc-engineered antibodies with immune effector functions completely abolished. PLoS One. 2021; WO2021234402A2; U.S. Pat. No. 8,969,526; EP3692065B1; and U.S. Pat. No. 7,083,784, each of which is incorporated herein by reference.

### Fusion or Conjugation to Half-Life Extension Moieties

[0457] In some embodiments, a fusion protein or conjugate of the present disclosure may comprise one or more other moieties which provide the fusion protein or conjugate with increased (in vivo) half-life. In vivo half-life extension means, that the fusion protein or conjugate has an increased half-life in a mammal, such as a human subject, after administration.

[0458] Non-limiting examples of half-life extension moieties suitable for use in the present disclosure include polyethylene glycol (PEG) molecules, serum proteins or fragments thereof, binding units that can bind to serum proteins, an Fc portion, and small proteins or peptides that can bind to serum proteins.

[0459] In some embodiments, a fusion protein or conjugate of the present disclosure may comprise a binding moiety that can bind to serum albumin, such as human serum albumin, or a serum immunoglobulin, such as IgG. In one embodiment, a fusion protein or conjugate of the present disclosure may comprise a binding moiety that can bind to human serum albumin. In one embodiment, the binding moiety is a single-domain antibody (e.g., VHH).

[0460] For example and without limitation, albumin binders that are described in, e.g., WO 04/041865, WO 06/122787, WO2012/175400, WO 2012/175741, WO2015/173325, WO2017/080850, WO2017/085172, WO2018/104444, WO2018/134235, WO2018/134234, each of which is incorporated herein by reference is its entirety, can be used in the fusion protein or conjugate of the present disclosure.

### Fusion or Conjugation to Cytokines

[0461] In some embodiments, a fusion protein or conjugate of the present disclosure may comprise one or more cytokine molecules. Non-limiting exemplary cytokine molecules that may be conjugated with include interleukin-2 (IL-2), transforming growth factor beta (TGF-β), thymic stromal lymphopoietin (TSLP), or a variant or combination thereof.

[0462] The cytokine IL-2 plays a major role in the activation and function of Tregs. Incorporating IL-2 into the anti-TNFR2 fusion protein or conjugate of the present disclosure may enhance the ability of the anti-TNFR2 antigen-binding protein to promote Tregs expansion and stabilization.

[0463] In some embodiments, a fusion protein or conjugate of the present disclosure may comprise two polypeptide chains, each polypeptide chain having the following structure: (anti-TNFR2 VHH) n-Linker-Fc-(IL-2)m, where n and m is independently any integral number (e.g., 1, 2, 3, 4, 5, etc). When n≥2, each anti-TNFR2 VHH may be optionally operably linked to another anti-TNFR2 VHH via a linker. When m≥2, each IL-2 may be optionally operably linked to another IL-2 via a linker.

[0464] In one embodiment, a fusion protein or conjugate of the present disclosure comprises two polypeptide chains, each polypeptide chain having the following structure: (anti-TNFR2 VHH)-Linker-Fc-(IL-2).

[0465] IL-2 fusion proteins may be prepared as described in e.g., U.S. Pat. No. 10,174,091, WO2014/023752, WO2019/246404, each of which is incorporated by reference in its entirety.

[0466] In one embodiment, the IL-2 molecule used in the fusion proteins or conjugates of the present disclosure is a wild-type IL-2 having the amino acid sequence: APTSSSTKKTQLQLEHLLLDLQMILNGINNYKNPKLTRMLTFKFYMPKKATELKHLQCLEEELKPLEEVLNLAQSKNFHLR PRDLISNINVIVLELKGSETTFMCEYADETATIVEFLNRWITFCQSIISTLT (SEQ ID NO: 3926)

[0467] In some embodiments, the IL-2 molecule used in the fusion proteins or conjugates of the present disclosure is a variant of IL-2 having an amino acid sequence that is at least 90%, 91%, 92%, 93%, 94%, 95%, 96%, 97%, 98%, or 99% identity to SEQ ID NO: 3926.

[0468] In one embodiment, the IL-2 molecule used in the fusion proteins or conjugates of the present disclosure is a variant of IL-2 with a N88D mutation (bolded in the sequence below), having the amino acid sequence: APTSSSTKKTQLQLEHLLLDLQMILNGINNYKNPKLTRMLTFKFYMPKKATELKHLQCLEEELKPLEEVLNLAQSKNFHLR PRDLISDINVIVLELKGSETTFMCEYADETATIVEFLNRWITFCQSIISTLT (SEQ ID NO: 3927)

[0469] Other suitable IL-2 variants that can be used in the fusion proteins or conjugates of the present disclosure include those described in U.S. Pat. Nos. 10,174,091, 10,174,092, 11,091,526, 11,091,527, WO2016/164937, U.S. Pat. Nos. 9,580,486, 7,105,653, 9,616,105, 9,428,567, US2017/0051029, US2014/0286898A1, WO2014/153111, WO2010/085495, WO2016/014428, WO2016/025385, and US2006/0269515, each of which are incorporated by reference in its entirety.

### Fusion or Conjugation to Other Moieties

[0470] Anti-TNFR2 antigen-binding proteins (e.g., antibodies such as single-domain antibodies) provided herein may be operably linked, directly or indirectly, to a second moiety, such as but not limited to, a detectable label, a drug, a toxin, a radionuclide, an enzyme, an immunomodulatory agent, a cytokine, a cytotoxic agent, a small molecule drug, a chemotherapeutic agent, a therapeutic agent, a diagnostic agent, or a combination thereof.

[0471] In some embodiments, a conjugate of the present disclosure comprises a label, which can generate a detectable signal. Such conjugates can be used for research or diagnostic purposes, such as for the in vivo detection of cancer. Preferably, the label is capable of producing, either directly or indirectly, a detectable signal. For example, the label may be radio-opaque or a radioisotope (such as 3H, 14C, 32P, 35S, 123I, 125I, 131I); a fluorescent (fluorophore) or chemiluminescent (chromophore) compound (such as fluorescein isothiocyanate, rhodamine or luciferin); an enzyme (such as β-galactosidase, alkaline phosphatase, or horseradish peroxidase); an imaging agent; or a metal ion. In some embodiments, the label is a radioactive atom for scintigraphic studies, for example 99Tc or 123I, or a spin label for nuclear magnetic resonance (NMR) imaging, such as zirconium-89, iodine-123, iodine-131, indium-111, fluorine-19, carbon-13, nitrogen-15, oxygen-17, gadolinium, manganese, or iron. Zirconium-89 may also be complexed to various metal chelating agents and conjugated to antibodies, e.g., for PET imaging (WO 2011/056983).

[0472] Anti-TNFR2 antigen-binding proteins (e.g., antibodies such as single-domain antibodies) of the present disclosure may be conjugated to another moiety, such as an epitope tag, e.g., for the purpose of purification or detection. Examples of such molecules that are useful in protein purification include those that present structural epitopes capable of being recognized by a second molecule. This is commonly employed in protein purification by affinity chromatography, in which a molecule is immobilized on a solid support and exposed to a heterogeneous mixture containing a target protein conjugated to a molecule capable of binding the immobilized compound. Non-limiting examples of epitope tag molecules that can be conjugated to anti-TNFR2 antigen-binding proteins (e.g., antibodies such as single-domain antibodies) of the present disclosure, e.g., for the purposes of molecular recognition include a poly-histidine tag (His-tag), a myc-tag, human influenza hemagglutinin (HA) tag, a FLAG-tag, maltose-binding protein, glutathione-S-transferase, biotin, and streptavidin. Conjugates containing the epitopes presented by these molecules are capable of being recognized by complementary molecules such as maltose, glutathione, a nickel-containing complex, an anti-FLAG antibody, an anti-myc antibody, an anti-HA antibody, streptavidin, or biotin, respectively. For example, one can purify an anti-TNFR2 antigen-binding protein of the present disclosure that has been conjugated to an epitope tag from a complex mixture of other proteins and biomolecules (e.g., DNA, RNA, carbohydrates, phospholipids, etc) by treating the mixture with a solid phase resin containing a complementary molecule that can selectively recognize and bind the epitope tag of the TNFR2 antibody or fragment thereof. Examples of solid phase resins include agarose beads, which are compatible with purifications in aqueous solution.

[0473] In some embodiments, a conjugate of the present disclosure may comprise one or more anti-TNFR2 VHH domains described herein conjugated to a therapeutic agent, which can be cytotoxic, cytostatic, or otherwise provides some therapeutic benefit. In some embodiments, the cytotoxic agent is a drug, a chemotherapeutic agent, a growth inhibitory agent, a toxin (e.g., an enzymatically active toxin of bacterial, fungal, plant, or animal origin, or fragments thereof), or a radioactive isotope (e.g., a radioconjugate), Such conjugates may be applicable to, e.g., the treatment or prevention of a disease associated with autoreactive cytotoxic T-cell activity. In some embodiments, antibody drug conjugates described herein may allow targeted delivery of a drug moiety to a target tissue (e.g., tumors).

[0474] In some embodiments, a conjugate of the present disclosure comprises a toxin. In some embodiments, the toxin includes, for example, bacterial toxins such as diphtheria toxin, plant toxins such as ricin, small molecule toxins such as geldanamycin (Mandler et al., J. Nat. Cancer Inst. 92 (19): 1573-1581 (2000); Mandler et al., Bioorganic & Med. Chem. Letters 10:1025-1028 (2000); Mandler et al., Bioconjugate Chem. 13:786-791 (2002)), maytansinoids (EP 1391213; Liu et al., Proc. Natl. Acad. Sci. USA 93:8618-8623 (1996)), and calicheamicin (Lode et al., Cancer Res. 58:2928 (1998); Hinman et al., Cancer Res. 53:3336-3342 (1993)). The toxins may exert their cytotoxic and cytostatic effects by mechanisms including tubulin binding, DNA binding, or topoisomerase inhibition. Examples of other therapeutic agents that can be conjugated to an anti-TNFR2 antigen-binding protein of the present disclosure are described herein (see “Treatment Methods and Other Uses” section).

[0475] In some embodiments, anti-TNFR2 antigen-binding proteins (e.g., antibodies such as single-domain antibodies) of the present disclosure may be fused or conjugated to one or more moieties that facilitate delivery to the central nervous system (CNS)/brain. The moiety that can facilitate delivery of an anti-TNFR2 antigen-binding protein to the central nervous system (CNS)/brain can be for example, a peptide, a polypeptide, small molecule, a lipid, or a synthetic polymer. Various approaches to deliver single-domain antibodies into the brain are described in Pothin et al., Pharmaceutics 2020, 12 (10), 937, which is incorporated herein by reference in its entirety.

[0476] As a non-limiting example, an anti-TNFR2 antigen-binding protein (e.g., antibody such as single-domain antibody) of the present disclosure may be fused or conjugated to a moiety (e.g., an antibody) that binds to the transferrin receptor (TfR) or insulin receptor. The transferrin receptor (TfR) is highly expressed by brain capillary endothelial cells (BCECs) forming the blood-brain barrier (BBB) and has been utilized as a target for brain drug delivery. Monoclonal antibodies binding to the TfR, such as clone Ri7, have been shown to internalize into BCECs in vivo. As another example, an anti-TNFR2 antigen-binding protein (e.g., antibody such as single-domain antibody) of the present disclosure may be conjugated to hydrophobic fatty acid moieties, such as C18 fatty acid (stearic acid), C16 fatty acid (palmitic acid) or C8 fatty acid (octanoic acid) moieties; or amphiphilic block copolymer moieties, such as polyethylene oxide)-poly(propylene oxide)-poly(ethylene oxide) (pluronics or poloxamers) or poly(2-oxasolines). Various fatty acid moieties and block copolymer moieties that can be utilized for brain delivery of proteins are described in, e.g., Yi and Kabanov, J Drug Target. 2013; 21 (10): 940-955, which is incorporated herein by reference in its entirety.

[0477] Example methods for attaching a moiety, such as a label, to a binding protein include those described in Hunter, et al., Nature 144:945 (1962); David, et al., Biochemistry 13:1014 (1974); Pain, et al., J. Immunol. Meth. 40:219 (1981); Nygren, J. Histochem, and Cytochem. 30:407 (1982); Wensel and Meares, Elsevier, N.Y. (1983); and Colcher et al., Meth. Enzymol., 121:802-16 (1986). Additional suitable methods for preparing the conjugates of the present disclosure include those described in, e.g., WO 2009/067800, WO 2011/133886, and US2014322129, incorporated by reference herein in their entirety.

[0478] In some embodiments, the attachment between an anti-TNFR2 antigen-binding protein and a second moiety can be covalent or non-covalent, e.g., via a biotin-streptavidin non-covalent interaction. In some embodiments, a second moiety can be attached to an anti-TNFR2 antigen-binding protein using any of various molecular biological or chemical conjugation and linkage methods known in the art and described below. In some embodiments, linkers such as peptide linkers, cleavable linkers, non-cleavable linkers, or linkers that aid in the conjugation reaction, can be used to link, or conjugate a second moiety to an anti-TNFR2 antigen-binding protein described herein.

[0479] In some embodiments, an anti-TNFR2 antigen-binding protein (e.g., antibody such as single-domain antibody) is conjugated to one or more second moieties, e.g., about 1 to about 20 moieties per molecule, optionally via a linker. In some embodiments, the one or more second moieties can be the same or different. The linker may be composed of one or more linker components. For covalent attachment of an antibody and the second moiety, the linker typically has two reactive functional groups, i.e., bivalency in a reactive sense. Bivalent linker reagents which are useful to attach two or more functional or biologically active moieties, such as peptides, nucleic acids, drugs, toxins, antibodies, haptens, and reporter groups have been described in, e.g., Hermanson, G. T. (1996) Bioconjugate Techniques; Academic Press: New York, p 234-242.

[0480] In some embodiments, a linker used in a conjugate of the present disclosure may include 6-maleimidocaproyl (“MC”), maleimidopropanoyl (“MP”), valine-citrulline (“val-cit”), a alanine-phenylalanine (“ala-phe”), p-aminobenzyloxycarbonyl (“PAB”), N-Succinimidyl 4-(2-pyridylthio) pentanoate (“SPP”), N-Succinimidyl 4-(N-maleimidomethyl)cyclohexane-I carboxylate (“SMCC”), or N-Succinimidyl(4-iodo-acetyl)aminobenzoate (“STAB”), or a combination thereof.

[0481] In some embodiments, a linker used in a conjugate of the present disclosure may comprise amino acid residues. Exemplary amino acid linker components include a dipeptide, a tripeptide, a tetrapeptide or a pentapeptide. Exemplary dipeptides include valine-citrulline (vc or val-cit), alanine-phenylalanine (af or ala-phe). Exemplary tripeptides include glycine-valine-citrulline (gly-val-cit) and glycine-glycine-glycine (gly-gly-gly), Amino acid residues used in an amino acid linker component may include naturally occurring amino acids, as well as minor amino acids and non-naturally occurring amino acid analogs, such as citrulline. Amino acid linker components can be designed and optimized in their selectivity for enzymatic cleavage by particular enzymes, for example, a tumor-associated protease, cathepsin B, C and D, or a plasmin protease.

[0482] Conjugates of an anti-TNFR2 antigen-binding protein (e.g., antibody such as single-domain antibody) and second moiety (e.g., cytotoxic agent) can be made using a variety of bifunctional protein-coupling agents such as N-succinimidyl-3-(2-pyridyldithiol) propionate (SPDP), iminothiolane (IT), bifunctional derivatives of imidoesters (such as dimethyl adipimidate HCl), active esters (such as disuccinimidyl substrate), aldehydes (such as glutaraldehyde), bis-azido compounds (such as bis(p-azidobenzoyl) hexanediamine), bis-diazonium derivatives (such as bis-(p-diazoniumbenzoyl)-ethylenediamine), diisocyanates (such as toluene 2,6-diisocyanate), and bis-active fluorine compounds (such as 1,5-difluoro-2,4-dinitrobenzene).

[0483] Conjugates of the present disclosure can be prepared by a variety of methods. For example, the conjugation method may include: (1) reaction of a nucleophilic group of a VHH domain with a bivalent linker reagent, to form VHH-Linker, via a covalent bond, followed by reaction with a drug moiety; or (2) reaction of a nucleophilic group of a drug moiety with a bivalent linker reagent, to form drug-linker, via a covalent bond, followed by reaction with the nucleophilic group of a VHH domain.

[0484] Nucleophilic groups on proteins including antibodies (e.g., VHH domains), include, but are not limited to: (i) N-terminal amine groups, (ii) side chain amine groups (e.g., lysine), (iii) side chain thiol groups (e.g., cysteine), and (iv) sugar hydroxyl or amino groups where the antibody is glycosylated. Amine, thiol, and hydroxyl groups are nucleophilic and capable of reacting to form covalent bonds with electrophilic groups on linker moieties and linker reagents including: (i) active esters such as NHS esters, HOBt esters, haloformates, and acid halides; (ii) alkyl and benzyl halides such as haloacetamides; (iii) aldehydes, ketones, carboxyl, and maleimide groups. Additional nucleophilic groups can be introduced into proteins (e.g., antibodies such as VHH domains) through the reaction of lysines with 2-iminothiolane (Traut's reagent) resulting in conversion of an amine into a thiol. Reactive thiol groups may be introduced into a protein (e.g., antibody such as a VHH domain) by introducing one, two, three, four, or more cysteine residues.

[0485] Conjugates, such as antibody drug conjugates, may also be produced by modification of an antibody, such as a VHH domain, to introduce electrophilic moieties, which can react with nucleophilic substituents on the linker reagent or drug. The sugars of glycosylated antibodies may be oxidized, e.g., with periodate oxidizing reagents, to form aldehyde or ketone groups which may lead with the amine group of linker reagents or drug moieties. The resulting imine Schiff base groups may form a stable linkage, or may be reduced, e.g., by borohydride reagents to form stable amine linkages. In one embodiment, reaction of the carbohydrate portion of a glycosylated antibody with either galactose oxidase or sodium meta-periodate may yield carbonyl (aldehyde and ketone) groups in the protein that can react with appropriate groups on the drug (Hermanson, Bioconjugate Techniques). In another embodiment, proteins containing N-terminal serine or threonine residues can react with sodium meta-periodate, resulting in production of an aldehyde in place of the first amino acid. Such aldehyde can be reacted with a drug moiety or linker nucleophile.

[0486] Likewise, nucleophilic groups on a drug moiety include, but are not limited to: amine, thiol, hydroxyl, hydrazide, oxime, hydrazine, thiosemicarbazone, hydrazine carboxylate, and arylhydrazide groups capable of reacting to form covalent bonds with electrophilic groups on linker moieties and linker reagents including: (i) active esters such as NHS esters, HOBi esters, haloformates, and acid halides; (ii) alkyl and benzyl halides such as haloacetamides; (iii) aldehydes, ketones, carboxyl, and maleimide groups.

[0487] Alternatively, a fusion protein containing a VHH domain and cytotoxic agent may be made, e.g., by recombinant DNA techniques or peptide synthesis. A DNA sequence may be engineered to comprise respective regions encoding the two portions of the fusion protein either adjacent to one another or separated by a region encoding a linker peptide which does not impair the desired properties of the fusion protein. The DNA sequence can be then transfected into a host cell that expresses the fusion protein. The fusion protein can be recovered from the cell culture and purified using techniques known in the art.

### Linkers

[0488] In some embodiments, the one or more polypeptides of the fusion proteins of the present disclosure are operably linked via peptide linkers. A peptide linker can range from 2 amino acids to 60 or more amino acids, and in certain aspects a peptide linker ranges from 3 amino acids to 50 amino acids, from 4 to 30 amino acids, from 5 to 25 amino acids, from 10 to 25 amino acids, 10 amino acids to 60 amino acids, from 12 amino acids to 20 amino acids, from 20 amino acids to 50 amino acids, or from 25 amino acids to 35 amino acids in length.

[0489] In some embodiments, a peptide linker, e.g., a peptide linker separating two VHH domains or an VHH domain and a heavy chain constant region, is at least 5 amino acids, at least 6 amino acids or at least 7 amino acids in length and optionally is up to 30 amino acids, up to 40 amino acids, up to 50 amino acids or up to 60 amino acids in length.

[0490] In some embodiments, the linker ranges from 5 amino acids to 50 amino acids in length, e.g., ranges from 5 to 50, from 5 to 45, from 5 to 40, from 5 to 35, from 5 to 30, from 5 to 25, or from 5 to 20 amino acids in length. In other embodiments of the foregoing, the linker ranges from 6 amino acids to 50 amino acids in length, e.g., ranges from 6 to 50, from 6 to 45, from 6 to 40, from 6 to 35, from 6 to 30, from 6 to 25, or from 6 to 20 amino acids in length. In yet other embodiments of the foregoing, the linker ranges from 7 amino acids to 50 amino acids in length, e.g., ranges from 7 to 50, from 7 to 45, from 7 to 40, from 7 to 35, from 7 to 30, from 7 to 25, or from 7 to 20 amino acids in length.

[0491] In some embodiments, charged (e.g., charged hydrophilic linkers) and/or flexible linkers are used. Examples of flexible linkers that can be used in the fusion proteins of the disclosure include those disclosed by Chen et al, 2013, Adv Drug Deliv Rev. 65 (10): 1357-1369 and Klein et al., 2014, Protein Engineering, Design & Selection 27 (10): 325-330. Particularly useful flexible linkers are or comprise repeats of glycines and serines (termed “GS-linker” herein), e.g., a monomer or multimer of GₙS (SEQ ID NO: 4013) or SGₙ (SEQ ID NO: 4014), where n is an integer from 1 to 10, e.g., 1 2, 3, 4, 5, 6, or 7, 8, 9 or 10. In one embodiment, the linker is or comprises a monomer or multimer of repeat of G₄S (SEQ ID NO: 3969), e.g., (GGGGS)ₙ (SEQ ID NO: 4015).

[0492] Polyglycine linkers can suitably be used in the fusion proteins of the disclosure. In some embodiments, a peptide linker used herein comprises two consecutive glycines (2Gly), three consecutive glycines (3Gly), four consecutive glycines (4Gly) (SEQ ID NO: 4016), five consecutive glycines (5Gly) (SEQ ID NO: 4017), six consecutive glycines (6Gly) (SEQ ID NO: 4018), seven consecutive glycines (7Gly) (SEQ ID NO: 4019), eight consecutive glycines (8Gly) (SEQ ID NO: 4020), or nine consecutive glycines (9Gly) (SEQ ID NO: 4021).

[0493] In some embodiments, a GS-linker used herein comprises an amino acid sequence selected from GGSGGS, i.e., (GGS)₂ (SEQ ID NO: 4022); GGSGGSGGS, i.e., (GGS)₃ (SEQ ID NO: 4023); GGSGGSGGSGGS, I.e., (GGS)₄ (SEQ ID NO: 4024); and GGSGGSGGSGGSGGS, i.e., (GGS)₅ (SEQ ID NO: 4025). In some embodiments, the fusion proteins can include a combination of a GS-linker and a glycine linker.

[0494] In one embodiment, two or more VHHs are linked via a GGGGSGGGGSGGGGS (SEQ ID NO: 3970) linker. In one embodiment, two or more VHHs are linked via a GGGGSGGGGS (SEQ ID NO: 4026) linker. In one embodiment, a VHH and an Fc region are linked via a GGGGSESKYGPPCPSCP (SEQ ID NO: 4008) linker. In one embodiment, a VHH and an Fc region are linked via a GGGGS (SEQ ID NO: 3969) linker.

[0495] In some embodiments, the one or more polypeptides of the fusion proteins of the present disclosure are operably linked via a “rigid” peptide linker. Such peptidic linker may comprise a proline-rich peptide. In one embodiment, a rigid peptide linker comprises PAPAPAPAPAPAPAPAP (SEQ ID NO: 4009). In one embodiment, a rigid peptide linker comprises GGGGSPAPAPAPAPAPAPAPAPGGGGS (SEQ ID NO: 4012). In one embodiment, a rigid peptide linker comprises A(EAAAK)nA (SEQ ID NO: 4027), where n is any integer, e.g., 12, 3, 4, 5, 6, or 7, 8, 9 or 10.

[0496] Other exemplary peptide linkers that can be used in the fusion proteins described herein are shown in Table 2.

TABLE 2
Exemplary Peptide Linker Sequences

| Linker | Amino acid sequence | SEQ ID NO |
|---|---|---|
| G4S | GGGGS | 3969 |
| (G₄S)₃ | GGGGSGGGGSGGGGS | 3970 |
| Linker 3 | GGSEGKSSGSGSESKSTGGS | 3971 |
| Linker 4 | GGGSGGGS | 3972 |
| Linker 3 | GGGSGGGSGGGS | 3973 |
| Linker 4 | GGGSGGGSGGGSGGGS | 3974 |
| Linker 5 | GGGSGGGSGGGSGGGSGGGS | 3975 |
| Linker 6 | GGGGSGGGGSGGGGSGGGGS | 3976 |
| Linker 7 | GGGGSGGGGSGGGGSGGGGSGGGGS | 3977 |
| Linker 8 | IRPRAIGGSKPRVA | 3978 |
| Linker 9 | GKGGSGKGGSGKGGS | 3979 |
| Linker 10 | GGKGSGGKGSGGKGS | 3980 |
| Linker 11 | GGGKSGGGKSGGGKS | 3981 |
| Linker 12 | GKGKSGKGKSGKGKS | 3982 |
| Linker 13 | GGGKSGGKGSGKGGS | 3983 |
| Linker 14 | GKPGSGKPGSGKPGS | 3984 |
| Linker 15 | GKPGSGKPGSGKPGSGKPGS | 3985 |
| Linker 16 | GKGKSGKGKSGKGKSGKGKS | 3986 |
| Linker 17 | STAGDTHLGGEDFD | 3987 |
| Linker 18 | GEGGSGEGGSGEGGS | 3988 |
| Linker 19 | GGEGSGGEGSGGEGS | 3989 |
| Linker 20 | GEGESGEGESGEGES | 3990 |
| Linker 21 | GGGESGGEGSGEGGS | 3991 |
| Linker 22 | GEGESGEGESGEGESGEGES | 3992 |
| Linker 23 | GSTSGSGKPGSGEGSTKG | 3993 |
| Linker 24 | PRGASKSGSASQTGSAPGS | 3994 |
| Linker 25 | GTAAAGAGAAGGAAAGAAG | 3995 |
| Linker 26 | GTSGSSGSGSGGSGSGGGG | 3996 |
| Linker 27 | GSGS | 3997 |
| Linker 28 | APAPAPAPAP | 3998 |
| Linker 29 | APAPAPAPAPAPAPAPAPAP | 3999 |
| Linker 30 | AEAAAKEAAAKEAAAAKEAAAAKEAAAAKAAA | 4000 |
| (GGGGS)6 linker | GGGGSGGGGSGGGGSGGGGSGGGGSGGGGS | 4001 |
| (GGGGS)7 linker | GGGGSGGGGSGGGGSGGGGSGGGGSGGGGSGGGGS | 4002 |
| G1 hinge | EPKSCDKTHTCPPCP | 4003 |
| 9GS-G1 hinge | GGGGSGGGSEPKSCDKTHTCPPCP | 4004 |
| Llama upper long hinge | EPKTPKPQPAAA | 4005 |
| region | | |
| G3 hinge | ELKTPLGDTTHTCPRCPEPKSCDTPPPCPRCPEPKSCDTPPPC | 4006 |
| | PRCPEPKSCDTPPPCPRCP | |
| G4 hinge | ESKYGPPCPSCP | 4007 |
| G4S-G4 hinge | GGGGSESKYGPPCPSCP | 4008 |
| Proline-linker 1 | PAPAPAPAPAPAPAPAP | 4009 |
| Proline-linker 2 | GGGGSPÅPAPAPAPAPAPAPAP | 4010 |
| Proline-linker 3 | PÅPAPAPAPAPAPAPAPGGGGS | 4011 |
| Proline-linker 4 | GGGGSPAPAPAPAPAPAPAPAPGGGGS | 4012 |

### Exemplary Fusion Proteins of the Present Disclosure

[0497] Non-limiting examples of fusion proteins (e.g., bivalent, or tetravalent constructs with/without Fc regions, IL-2 fusion constructs) are disclosed in the “Examples” and “List of Sequences” sections below.

[0498] In various embodiments, a fusion protein of the present disclosure comprises any one of SEQ ID NOs: 3933-3964, 4483-4513, 4686-4696, 4709-4716, and 4735-4770, or a similar sequence thereof having at least 70%, at least 75%, at least 80%, at least 85%, at least 90%, at least 95%, at least 98%, or at least 99% sequence identity.

[0499] In some embodiments, a fusion protein of the present disclosure comprises any one of SEQ ID NOs: 4483-4513, 4686-4696, 4709-4716, and 4735-4770, or a similar sequence thereof having at least 70%, at least 75%, at least 80%, at least 85%, at least 90%, at least 95%, at least 98%, or at least 99% sequence identity.

[0500] In some embodiments, a fusion protein of the present disclosure comprises SEQ ID NO: 4483 or a similar sequence thereof having at least 70%, at least 75%, at least 80%, at least 85%, at least 90%, at least 95%, at least 98%, or at least 99% sequence identity.

[0501] In some embodiments, a fusion protein of the present disclosure comprises SEQ ID NO: 4489 or a similar sequence thereof having at least 70%, at least 75%, at least 80%, at least 85%, at least 90%, at least 95%, at least 98%, or at least 99% sequence identity.

[0502] In some embodiments, a fusion protein of the present disclosure comprises any one of SEQ ID NO: 4709-4716 or a similar sequence thereof having at least 70%, at least 75%, at least 80%, at least 85%, at least 90%, at least 95%, at least 98%, or at least 99% sequence identity.

[0503] In some embodiments, a fusion protein of the present disclosure comprises any one of SEQ ID NO: 4735-4770 or a similar sequence thereof having at least 70%, at least 75%, at least 80%, at least 85%, at least 90%, at least 95%, at least 98%, or at least 99% sequence identity.

[0504] In some embodiments, provided herein is a fusion protein that specifically binds TNFR2, comprising two polypeptides, wherein each polypeptide comprises two anti-TNFR2 antigen-binding proteins as described herein which are operably linked to each other, wherein one of the antigen-binding proteins is further operably linked to a dimerization domain (e.g., an immunoglobulin Fc region). The two polypeptides dimerize in the presence of the dimerization domain to form a tetravalent molecule (i.e., having four anti-TNFR2 antigen-binding proteins per molecule).

[0505] In some embodiments, the two antigen-binding proteins are operably linked to each other via a peptide linker. In one embodiment, the peptide linker is a (G4S)n (SEQ ID NO: 4015) linker. In one embodiment, the peptide linker is a GGGGSGGGGSGGGGS linker (SEQ ID NO: 3970).

[0506] In some embodiments, one of the two antigen-binding proteins is further operably linked to an immunoglobulin Fc region via a peptide linker. In one embodiment, the peptide linker is a (G4S)n (SEQ ID NO: 4015) linker. In one embodiment, the peptide linker is a GGGGS linker (SEQ ID NO: 3969).

[0507] In some embodiments, the fusion protein described herein further comprises an immunoglobulin Fc region. In some embodiments, the immunoglobulin Fc region is an Fc region of a human immunoglobulin. In some embodiments, the immunoglobulin Fc region is an Fc region of human IgG1, IgG2, IgG3 or IgG4, or a variant thereof.

[0508] In some embodiments, the immunoglobulin Fc region is an Fc region of human IgG1, or a variant thereof. In some embodiments, the Fc region of human IgG1 comprises one or more mutations selected from L234A, L235A, G237A, D265A, N297A, and/or P329A according to EU numbering. In some embodiments, the Fc region of human IgG1 comprises a set of mutations selected from
[0509] 1). L234A and L235A;
[0510] 2). L234A, L235A, and P329A;
[0511] 3). D265A, N297A and P329A; and
[0512] 4). L234A, L235A, and G237A.

[0513] In some embodiments, the immunoglobulin Fc region is an Fc region of human IgG1 comprising L234A, L235A, and P329A.

[0514] In some embodiments, the immunoglobulin Fc region is an Fc region of human IgG4, or a variant thereof. In some embodiments, the Fc region of human IgG4 comprises one or more mutations selected from S228P, L235E, L235A, and/or F234A according to EU numbering. In some embodiments, the Fc region of human IgG4 comprises a set of mutations selected from
[0515] 1). S228P and L235E;
[0516] 2). S228P and L235A;
[0517] 3). S228P, F234A, and L235E; and
[0518] 4). S228P, F234A, and L235A.

[0519] In some embodiments, the immunoglobulin Fc region is an Fc region of human IgG4 comprising S228P and L235E.

[0520] It is to be understood that although the exemplary fusion proteins described herein contain non-humanized VHH amino acid sequences, such non-humanized VHH amino acid sequences can be replaced with any of the humanized VHH amino acid sequences described herein (e.g., in Tables 1-1 and 1-2).

[0521] In some embodiments, the fusion protein described herein may further comprise a signal sequence at its N-terminus. Signal sequences may be present in the precursor molecule of the fusion protein and may be removed after the protein is secreted from the host cell during production. In some embodiments, the signal sequence is MAVMAPRTLVLLLSGALALTQTWA (SEQ ID NO: 3928) or a fragment or variant thereof. In some embodiments, the signal sequence is MYRMQLLSCIALSLALVTNS (SEQ ID NO: 3929), or a fragment or variant thereof.

### Polynucleotide Molecules

[0522] In another aspect, provided herein are polynucleotide molecules encoding the anti-TNFR2 antigen-binding proteins (e.g., antibodies including single-domain antibodies) or fusion proteins described herein. Polynucleotide molecules encoding polypeptide portion(s) of a conjugate of the present disclosure are also encompassed within the present disclosure.

[0523] In some embodiments, a polynucleotide molecule of the present disclosure encodes an anti-TNFR2 VHH amino acid sequence selected from SEQ ID NOs: 4, 7, 11, 15, 19, 23, 27, 31, 35, 39, 43, 47, 4064, 4068, 4072, 4521, 93-640, 4079-4125 2805-3363, 4359-4420, and 4605-4628, or a similar sequence thereof having at least 70%, at least 75%, at least 80%, at least 85%, at least 90%, at least 95%, at least 98%, or at least 99% sequence identity.

[0524] In some embodiments, a polynucleotide molecule of the present disclosure encoding an anti-TNFR2 VHH comprises the nucleotide sequence of any one of SEQ ID NOs: 48-59, 4073-4075, 4522, 4525, 4528, 4531, 3364-3922, 4421-4482, and 4629-4652, or a similar sequence thereof having at least 70%, at least 75%, at least 80%, at least 85%, at least 90%, at least 95%, at least 98%, or at least 99% sequence identity.

[0525] In an embodiment provided herein, a polynucleotide molecule of the present disclosure encodes a humanized VHH amino acid sequence selected from SEQ ID NOs: 81-92, 4076, 4078, 4523, 4526, 4529, 4532, 4731-4734, 641-1127, and 4126-4172, or a similar sequence thereof having at least 70%, at least 75%, at least 80%, at least 85%, at least 90%, at least 95%, at least 98%, or at least 99% sequence identity.

[0526] In an embodiment provided herein, a polynucleotide molecule of the present disclosure encodes a humanized VHH amino acid sequence of SEQ ID NO: 4526, or a similar sequence thereof having at least 70%, at least 75%, at least 80%, at least 85%, at least 90%, at least 95%, at least 98%, or at least 99% sequence identity. In an embodiment provided herein, the polynucleotide molecule encoding a humanized VHH amino acid sequence of SEQ ID NO: 4526 comprises the nucleotide sequence of SEQ ID NO: 4525, or a similar sequence thereof having at least 70%, at least 75%, at least 80%, at least 85%, at least 90%, at least 95%, at least 98%, or at least 99% sequence identity.

[0527] In an embodiment provided herein, a polynucleotide molecule of the present disclosure encodes a humanized VHH amino acid sequence of SEQ ID NO: 4529, or a similar sequence thereof having at least 70%, at least 75%, at least 80%, at least 85%, at least 90%, at least 95%, at least 98%, or at least 99% sequence identity. In an embodiment provided herein, the polynucleotide molecule encoding a humanized VHH amino acid sequence of SEQ ID NO: 4529 comprises the nucleotide sequence of SEQ ID NO: 4528, or a similar sequence thereof having at least 70%, at least 75%, at least 80%, at least 85%, at least 90%, at least 95%, at least 98%, or at least 99% sequence identity.

[0528] In an embodiment provided herein, a polynucleotide molecule of the present disclosure encodes a humanized VHH amino acid sequence of SEQ ID NO: 4532, or a similar sequence thereof having at least 70%, at least 75%, at least 80%, at least 85%, at least 90%, at least 95%, at least 98%, or at least 99% sequence identity. In an embodiment provided herein, the polynucleotide molecule encoding a humanized VHH amino acid sequence of SEQ ID NO: 4532 comprises the nucleotide sequence of SEQ ID NO: 4531, or a similar sequence thereof having at least 70%, at least 75%, at least 80%, at least 85%, at least 90%, at least 95%, at least 98%, or at least 99% sequence identity.

[0529] In an embodiment provided herein, a polynucleotide molecule of the present disclosure encodes a fusion protein comprising an amino acid sequence selected from SEQ ID NOs: 3933-3964, and 4483-4513, 4686-4696, 4709-4716, and 4735-4770, or a similar sequence thereof having at least 70%, at least 75%, at least 80%, at least 85%, at least 90%, at least 95%, at least 98%, or at least 99% sequence identity.

[0530] A polynucleotide molecule may be used to transform/transfect a host cell or host organism, e.g., for expression and/or production of a polypeptide. Suitable hosts or host cells for production of an anti-TNFR2 polypeptides described herein include any suitable fungal, prokaryotic, or eukaryotic cell or cell line or any suitable fungal, prokaryotic, or eukaryotic organism. A host or host cell comprising a polynucleotide molecule encoding an anti-TNFR2 antigen-binding protein polypeptide or fusion protein described herein is also encompassed by the present disclosure.

[0531] A polynucleotide molecule may be for example DNA, RNA, or a hybrid thereof, and may also comprise (e.g., chemically) modified nucleotides, like locked nucleic acids (LNA) or peptide nucleic acids (PNA). In some embodiments, the polynucleotide is single-stranded. In some embodiments, the polynucleotide is double-stranded. In one embodiment, the polynucleotide is in the form of double-stranded DNA (e.g., plasmid). In some embodiments, the polynucleotide is in the form of a single-stranded RNA (e.g., mRNA).

[0532] Techniques for generating polynucleotides may include, for example but not limited to, automated DNA synthesis; site-directed mutagenesis; combining two or more naturally occurring and/or synthetic sequences (or two or more parts thereof), introduction of mutations that lead to the expression of a truncated expression product; introduction of one or more restriction sites (e.g. to create cassettes and/or regions that may easily be digested and/or ligated using suitable restriction enzymes), and/or the introduction of mutations by means of a PCR reaction using one or more “mismatched” primers. Alternatively, polynucleotides of the present disclosure may be isolated from a suitable natural source. Polynucleotide sequences encoding naturally occurring (poly) peptides can for example be subjected to site-directed mutagenesis, to generate a polynucleotide molecule encoding polypeptide with sequence variation.

### Vectors

[0533] Also provided herein are vectors comprising the polynucleotide molecules encoding the anti-TNFR2 antigen-binding proteins (e.g., antibodies including single-domain antibodies), fusion proteins, or other relevant polypeptides of the present disclosure. A “vector” as used herein is a vehicle suitable for carrying genetic material into a host cell. A vector can include a nucleic acid vector, such as a plasmid or mRNA, or nucleic acids embedded into a bigger structure, such as a liposome or viral vector.

[0534] A vector can include one or more of the following elements: an origin of replication, one or more regulatory sequences (e.g., promoters, enhancers, terminators) that regulate the expression of a polypeptide of interest, and/or one or more selectable marker genes (such as, for example, antibiotic resistance genes and genes that can be used in colorimetric assays, for example, β-galactosidase). For DNA-based vectors, this usually includes the presence of elements for transcription (e.g., a promoter and a polyA signal) and translation (e.g., Kozak sequence). In some embodiments, the vector is an expression vector, i.e. a vector suitable for expressing an encoded polypeptide or construct under suitable conditions in a host cell.

[0535] To express an anti-TNFR2 antigen-binding protein or fusion protein (or fragments thereof) of the present disclosure, polynucleotides encoding partial or full-length polypeptide chains, e.g., obtained as described above (e.g., VHH, VHH-Fc), can be inserted into expression vectors such that the genes are operatively linked to one or more transcriptional and translational control sequences. The expression vector and expression control sequences are chosen to be compatible with the expression host cell used. Polynucleotides encoding the two or more polypeptide chains (when present and differ from one another) of an anti-TNFR2 antigen-binding protein or fusion protein of the present disclosure can be inserted into separate vectors, or, optionally, incorporated into the same expression vector.

[0536] In addition to polynucleotides encoding the polypeptide chain(s) of an anti-TNFR2 antigen-binding protein or fusion protein, the recombinant expression vectors of the invention may include regulatory sequences that control the expression of genes encoding the polypeptide chain(s) in a host cell. The design of the expression vector, including the selection of regulatory sequences, may depend on the choice of the host cell to be transformed and/or the desired level of protein expression. For example, suitable regulatory sequences for mammalian host cell expression include viral elements that direct high levels of protein expression in mammalian cells, such as promoters and/or enhancers derived from cytomegalovirus (CMV), Simian Virus 40 (SV40), adenovirus, (e.g., the adenovirus major late promoter (AdMLP)) and polyoma. Additional examples of viral regulatory elements, and sequences thereof, include those described in, e.g., U.S. Pat. Nos. 5,168,062; 4,510,245; and 4,968,615; the disclosures of each of which are incorporated herein by reference.

[0537] Recombinant expression vectors of the present disclosure may carry additional sequences, such as sequences that regulate replication of the vector in host cells (e.g., origins of replication) and selectable marker genes. A selectable marker gene facilitates selection of host cells into which the vector has been introduced (see e.g., U.S. Pat. Nos. 4,399,216; 4,634,665; and 5,179,017; the disclosure of each of which is incorporated herein by reference in its entirety). For example, typically the selectable marker gene confers resistance to antibiotics, such as ampicillin, chloramphenicol, kanamycin, or nourseothricin, or cytotoxic drugs, such as G418, puromycin, blasticidin, hygromycin or methotrexate, to a host cell into which the vector has been introduced. Suitable selectable marker genes can include the dihydrofolate reductase (DHFR) gene (for use in DHFR deficient host cells with methotrexate selection/amplification) and the neo gene (for G418 selection).

[0538] Vectors of the present disclosure may further include sequence elements that enhance the rate of translation of these genes or improve the stability or nuclear export of the mRNA that results from gene transcription. These sequence elements include, e.g., 5′ and 3′ untranslated regions, an internal ribosomal entry site (IRES), and polyadenylation signal site in order to direct efficient transcription of the gene carried on the expression vector.

[0539] Viral vectors can be used for the efficient delivery of exogenous genes into the genome of a cell (e.g., a eukaryotic or prokaryotic cell). Viral vectors are particularly useful for gene delivery because the polynucleotides contained within such genomes are typically incorporated into the genome of a target cell by generalized or specialized transduction. These processes occur as part of the natural viral replication cycle, and do not require added proteins or reagents to induce gene integration. Examples of suitable viral vectors include a retrovirus, adenovirus (e.g., Ad5, Ad26, Ad34, Ad35, and Ad48), parvovirus (e.g., adeno-associated viruses (AAV) such as AAV2, AAV8, AAV9), negative strand RNA viruses such as orthomyxovirus (e.g., influenza virus), rhabdovirus (e.g., rabies and vesicular stomatitis virus), paramyxovirus (e.g. measles and Sendai), positive strand RNA viruses, such as picornavirus and alphavirus, and double-stranded DNA viruses including adenovirus, herpes virus (e.g., Herpes Simplex virus types 1 and 2, Epstein-Barr virus, cytomegalovirus), baculovirus, coronavirus, and poxvirus (e.g., vaccinia, modified vaccinia Ankara (MVA), fowlpox and canarypox). Other viruses useful for delivering polynucleotides encoding polypeptides of the present disclosure include, for example Norwalk virus, togavirus, flavivirus, reoviruses, papovavirus, hepadnavirus, and hepatitis virus. Examples of retroviruses include, but are not limited to, avian leukosis-sarcoma, mammalian C-type, B-type viruses, D-type viruses, HTLV-BLV group, lentivirus, spumavirus (Coffin, J. M.1996. Fundamental Virology, DMKDN Fields, P M Howley, ed. (Philadelphia, Lippincott-Raven Publishers): 763-843., the disclosure of which is incorporated herein by reference). Other examples of viral genomes useful in the compositions and methods of the present disclosure include murine leukemia viruses, murine sarcoma viruses, mouse mammary tumor virus, bovine leukemia virus, feline sarcoma virus, feline leukemia virus, avian leukemia virus, human T-cell leukemia virus, baboon endogenous virus, Gibbon ape leukemia virus, Mason Pfizer monkey virus, simian immunodeficiency virus, simian sarcoma virus, Rous sarcoma virus, and lentiviruses.

### Host Cells

[0540] In one aspect, the present disclosure also provides host cells or host organisms that comprise the polynucleotides or vectors encoding the anti-TNFR2 antigen-binding proteins (e.g., antibodies including single-domain antibodies), fusion proteins, or other relevant polypeptides described herein. Suitable host cells or host organisms can be any suitable fungal, prokaryotic, or eukaryotic cell or cell line or any suitable fungal, prokaryotic, or eukaryotic organism. Host cells include progeny of a single host cell, and the progeny may not necessarily be completely identical (in morphology or in genomic DNA complement) to the original parent cell due to natural, accidental, or deliberate mutation. Host cells can also include cells transfected in vivo with a polynucleotide(s) or vector provided herein.

[0541] Exemplary eukaryotic cells include mammalian cells, such as primate or non-primate animal cells; fungal cells, such as yeast (e.g., Saccharomyces cerevisiae or Pichia pastoris); plant cells; and insect cells. Non-limiting exemplary mammalian cells include, but are not limited to, NSO cells, PER.C6® cells (Crucell), COS cells, SP2/0 cells, and 293 and CHO cells, and their derivatives, such as 293-6E, CHO-DG44, CHO-K1, CHO-S, and CHO-DS cells, Exemplary prokaryotic cells include bacterial cells such as Escherichia coli.

### Preparation Methods

[0542] The present disclosure also provides methods of producing the anti-TNFR2 antigen-binding proteins (e.g., antibodies including single-domain antibodies), fusion proteins, or conjugates described herein.

[0543] In some embodiments, a method may comprise transforming/transfecting a host cell or host organism with a polynucleotide encoding an anti-TNFR2 antigen-binding protein (e.g., antibody such as single-domain antibody), fusion protein, or other relevant polypeptide(s) described herein, expressing the anti-TNFR2 antigen-binding protein (e.g., antibody such as single-domain antibody), fusion protein, or other relevant polypeptide(s) in the host, optionally followed by one or more isolation and/or purification steps.

[0544] When recombinant expression vectors encoding one or more polypeptide(s) of an anti-TNFR2 antigen-binding protein (e.g., antibody such as single-domain antibody), fusion protein, or conjugate of the present disclosure are introduced into mammalian host cells, the host cells are cultured for a period of time sufficient to allow for expression of the protein(s) or polypeptide(s) in the host cells or secretion of the protein(s) or polypeptide(s) into the culture medium in which the host cells are grown. Protein(s) or polypeptide(s) can be recovered from the culture medium using standard protein purification methods. Host cells can also be used to produce portions of intact antibodies, such as VHH domains.

[0545] Once a protein or polypeptide of the present disclosure has been produced by recombinant expression, it can be purified by any method known in the art for purification of a protein or polypeptide, for example, by chromatography (e.g., ion exchange, affinity, particularly by affinity for TNFR2 after Protein A or Protein G selection, and sizing column chromatography), centrifugation, differential solubility, or by any other standard technique for the purification of proteins. Further, the proteins or polypeptides of the present disclosure can be fused to heterologous polypeptide sequences described herein (e.g., His-tag) or otherwise known in the art to facilitate purification or to produce therapeutic conjugates below). Once isolated, a protein or polypeptide of the present disclosure can, if desired, be further purified, e.g., by high performance liquid chromatography, or by gel filtration chromatography, such as on a Superdex™ column.

### Pharmaceutical Compositions and Formulations

[0546] The present disclosure also provides a composition comprising anti-TNFR2 antigen-binding protein (e.g., antibody such as single-domain antibody), fusion protein, or conjugate of the present technology, at least one polynucleotide molecule encoding the same, at least one vector comprising such a polynucleotide molecule, or at least one host cell comprising the polynucleotide molecule or vector. The composition may be a pharmaceutical composition. The composition may further comprise at least one pharmaceutically acceptable carrier, diluent, or excipient and/or adjuvant, and optionally comprise one or more further pharmaceutically active polypeptides and/or compounds.

[0547] As used herein, the term “pharmaceutically acceptable carrier” is intended to include any and all solvents, dispersion media, coatings, antibacterial and antifungal agents, isotonic and absorption delaying agents, and the like, compatible with pharmaceutical administration. Suitable carriers are described in the most recent edition of Remington's Pharmaceutical Sciences, which is incorporated herein by reference. Suitable examples of such carriers or diluents include, but are not limited to, water, saline, ringer's solutions, dextrose solution, and 5% human serum albumin. Liposomes and non-aqueous vehicles such as fixed oils may also be used. Supplementary active compounds can also be incorporated into the compositions.

[0548] Examples of suitable formulations include, but are not limited to, solutions, suspensions, powders, pastes, ointments, jellies, waxes, oils, lipids, lipid (cationic or anionic) containing vesicles (such as LIPOFECTIN™, Life Technologies, Carlsbad, CA), DNA conjugates, anhydrous absorption pastes, oil-in-water and water-in-oil emulsions, emulsions carbowax (polyethylene glycols of various molecular weights), semi-solid gels, and semi-solid mixtures containing carbowax. See also Powell et al. “Compendium of excipients for parenteral formulations” PDA (1998) J Phdomain Sci Technol 52:238-311.

[0549] A pharmaceutical composition of the present disclosure may be formulated according to its intended route of administration. Examples of suitable routes of administration include, e.g., Intravenous, subcutaneous, intratumoral, oral (e.g., buccal, sublingual), intranasal, inhalation, intraocular, intramuscular, intradermal, transdermal (i.e., topical), intraperitoneal, transmucosal, vaginal, and rectal administration, or injection to the CNS/brain (e.g., intraspinal, intracerebral, or intrathecal administration). Solutions or suspensions used for parenteral, intradermal, or subcutaneous application can include the following components: a sterile diluent such as water for injection, saline solution, polyethylene glycols, glycerine, propylene glycol or other synthetic solvents; antibacterial agents such as benzyl alcohol or methyl parabens; antioxidants such as ascorbic acid or sodium bisulfite; fixed oils; chelating agents such as ethylenediaminetetraacetic acid (EDTA); buffers such as phosphates, acetates, or citrates, and agents for the adjustment of tonicity such as sodium chloride or dextrose. The pH can be adjusted with acids or bases, such as hydrochloric acid or sodium hydroxide. The parenteral preparation can be enclosed in ampoules, disposable syringes or multiple dose vials made of plastic or glass.

[0550] Pharmaceutical compositions suitable for injectable use include sterile aqueous solutions (where water soluble) or dispersions and sterile powders for the extemporaneous preparation of sterile injectable solutions or dispersion. For intravenous administration, suitable carriers include, for example, physiological saline, bacteriostatic water, Cremophor EL®, or phosphate buffered saline (PBS). The composition is preferably sterile and has a proper fluidity. In most embodiments, the composition is stable under the conditions of manufacture and storage and can be preserved against the contaminating action of microorganisms such as bacteria and fungi. The carrier can be a solvent or dispersion medium containing, e.g., water, ethanol, polyol (for example, glycerol, propylene glycol, and liquid polyethylene glycol, and the like), and suitable mixtures thereof. The proper fluidity can be maintained, for example, by the use of a coating such as lecithin, by the maintenance of the required particle size in the case of dispersion and by the use of surfactants. Prevention of the contamination by microorganisms can be achieved by the inclusion of various antibacterial and antifungal agents, for example, parabens, chlorobutanol, phenol, ascorbic acid, thimerosal, and the like. In many cases, it is preferable to include isotonic agents, for example, sugars, polyalcohols such as mannitol, sorbitol, sodium chloride in the composition. Prolonged absorption of the injectable compositions can be brought about by including in the composition an agent which delays absorption, for example, aluminum monostearate and gelatin.

[0551] Sterile injectable solutions can be prepared by incorporating the active compound in the required amount in an appropriate solvent with one or a combination of ingredients described above, as required, followed by filtered sterilization. Generally, dispersions are prepared by incorporating the active compound into a sterile vehicle that contains a basic dispersion medium and the required other ingredients from those enumerated above. In the case of sterile powders for the preparation of sterile injectable solutions, methods of preparation include vacuum drying and/or freeze-drying that yields a powder of the active ingredient plus any additional desired ingredient from a previously sterile-filtered solution thereof.

[0552] Oral compositions may include an inert diluent or an edible carrier. They can be enclosed in gelatin capsules or compressed into tablets. For the purpose of oral therapeutic administration, the active compound can be incorporated with excipients and used in the form of tablets, troches, capsules, or liquid forms. Formulation in tablet and liquid forms may be used for protease insensitive VHHs. Oral compositions can also be prepared using a fluid carrier for use as a mouthwash, wherein the compound in the fluid carrier is applied orally and swished and expectorated or swallowed. Pharmaceutically compatible binding agents, and/or adjuvant materials can be included as part of the composition. The tablets, pills, capsules, troches and the like can contain any of the following ingredients, or compounds of a similar nature: a binder such as microcrystalline cellulose, gum tragacanth or gelatin; an excipient such as starch or lactose, a disintegrating agent such as alginic acid, Primogel, or corn starch; a lubricant such as magnesium stearate or Sterotes; a glidant such as colloidal silicon dioxide; a sweetening agent such as sucrose or saccharin; or a flavoring agent such as peppermint, methyl salicylate, or orange flavoring.

[0553] For administration by inhalation, the compounds are delivered in the form of an aerosol spray from pressured container or dispenser which contains a suitable propellant, e.g., a gas such as carbon dioxide, or a nebulizer.

[0554] Systemic administration can also be by transmucosal or transdermal means. For transmucosal or transdermal administration, penetrants appropriate to the barrier to be permeated are used in the formulation, Such penetrants are generally known in the art, and include, for example, for transmucosal administration, detergents, bile salts, and fusidic acid derivatives. Transmucosal administration can be accomplished through the use of nasal sprays or suppositories. For transdermal administration, the active compounds are formulated into ointments, salves, gels, or creams as generally known in the art.

[0555] The compounds can also be prepared in the form of suppositories (e.g., with conventional suppository bases such as cocoa butter and other glycerides) or retention enemas for rectal delivery.

[0556] For brain delivery, compounds of the present disclosure may be formulated to facilitate crossing of the blood-brain barrier. For example, anti-TNFR2 antigen-binding proteins (e.g., antibody such as single-domain antibody), fusion proteins, or conjugates of the present disclosure may be encapsulated into brain targeted liposomes, lipid nanoparticles, lipid microparticles, or lipid microcapsules for brain delivery. Example liposomes delivery systems are described in Pothin et al., Pharmaceutics 2020, 12 (10), 937, which is incorporated herein by reference in its entirety.

[0557] In some embodiments, the active compounds are prepared with carriers that can protect the compound against rapid elimination from the body, such as a controlled release formulation, including implants and microencapsulated delivery systems. Biodegradable, biocompatible polymers can be used, such as ethylene vinyl acetate, polyanhydrides, polyglycolic acid, collagen, polyorthoesters, and polylactic acid. Liposomal suspensions can also be used as pharmaceutically acceptable carriers. These can be prepared according to methods known to those skilled in the art, for example, as described in U.S. Pat. No. 4,522,811, which is incorporated herein by reference in its entirety.

[0558] It is especially advantageous to formulate oral or parenteral compositions in dosage unit form for ease of administration and uniformity of dosage. Dosage unit form as used herein refers to physically discrete units suited as unitary dosages for the subject to be treated; each unit containing a predetermined quantity of active compound calculated to produce the desired therapeutic effect in association with the required pharmaceutical carrier. The specification for the dosage unit forms of the disclosure is dependent on the unique characteristics of the active compound and the particular therapeutic effect to be achieved, and the limitations inherent in the art of compounding such an active compound for the treatment of individuals.

[0559] The pharmaceutical compositions (or components thereof) can be included in a kit, container, pack, or dispenser together with instructions for administration. These pharmaceutical compositions can be included in diagnostic kits with instructions for use.

[0560] Pharmaceutical compositions are administered in an amount effective for treatment or prophylaxis of the specific indication. The therapeutically effective amount is typically dependent on the weight of the subject being treated, the physical or health condition of the subject, the extensiveness of the condition to be treated, or the age of the subject being treated. In some embodiments, the pharmaceutical composition may be administered in an amount in the range of about 50 μg/kg body weight to about 50 mg/kg body weight per dose. In some embodiments, the pharmaceutical composition may be administered in an amount in the range of about 100 μg/kg body weight to about 50 mg/kg body weight per dose. In some embodiments, the pharmaceutical composition may be administered in an amount in the range of about 100 μg/kg body weight to about 20 mg/kg body weight per dose. In some embodiments, the pharmaceutical composition may be administered in an amount in the range of about 0.5 mg/kg body weight to about 20 mg/kg body weight per dose. Depending on the severity of the condition, the frequency and the duration of the treatment can be adjusted. Effective dosages and schedules for administering a pharmaceutical composition of the present disclosure may be determined empirically; for example, patient progress can be monitored by periodic assessment, and the dose adjusted accordingly. Moreover, interspecies scaling of dosages can be performed using well-known methods in the art (e.g., Mordenti et al., 1991, Phdomainaceut. Res. 8:1351).

[0561] In some embodiments, the pharmaceutical composition may be administered in an amount in the range of about 10 mg to about 1,000 mg per dose. In some embodiments, the pharmaceutical composition may be administered in an amount in the range of about 20 mg to about 500 mg per dose. In some embodiments, the pharmaceutical composition may be administered in an amount in the range of about 20 mg to about 300 mg per dose. In some embodiments, the pharmaceutical composition may be administered in an amount in the range of about 20 mg to about 200 mg per dose.

[0562] In some embodiments wherein the antigen-binding proteins of the present disclosure are administered as a viral vector (e.g., an AAV), dose ranges and frequency of administration of the viral vector described herein can vary depending on the nature of the viral vector, and the medical condition, as well as parameters of a specific patient and the route of administration used. In some embodiments, viral vector compositions can be administered to a subject at a dose ranging from about 1×10⁵ plaque forming units (pfu) to about 1×10¹⁵ pfu, depending on mode of administration, the route of administration, the nature of the disease and condition of the subject. In some cases, the viral vector compositions can be administered at a dose ranging from about 1×10⁸ pfu to about 1×10¹⁵ pfu, or from about 1×10¹⁰ pfu to about 1×10¹⁵ pfu, or from about 1×10⁸ pfu to about 1×10¹² pfu. A more accurate dose can also depend on the subject in which it is being administered. For example, a lower dose may be required if the subject is juvenile, and a higher dose may be required if the subject is an adult human subject. In certain embodiments, a more accurate dose can depend on the weight of the subject. In certain embodiments, for example, a juvenile human subject can receive from about 1×10⁸ pfu to about 1×10¹⁰ pfu, while an adult human subject can receive a dose from about 1×10¹⁰ pfu to about 1×10¹² pfu.

[0563] Various delivery systems are known and can be used to administer the pharmaceutical composition of the disclosure, e.g., encapsulation in liposomes, microparticles, microcapsules, recombinant cells capable of expressing the mutant viruses, receptor mediated endocytosis (see, e.g., Wu et al., 1987, J. Biol. Chem. 262:4429-4432). Methods of introduction include, but are not limited to, intradermal, intramuscular, intraperitoneal, Intravenous, subcutaneous, intranasal, intraocular, epidural, intraspinal, intracerebral, intrathecal, and oral routes. The composition may be administered by any convenient route, for example by infusion or bolus injection, by absorption through epithelial or mucocutaneous linings (e.g., oral mucosa, rectal and intestinal mucosa, etc.) and may be administered together with other biologically active agents. Administration can be systemic or local.

[0564] A pharmaceutical composition of the present disclosure can be delivered subcutaneously or intravenously with a standard needle and syringe. In addition, with respect to subcutaneous delivery, a pen delivery device readily has applications in delivering a pharmaceutical composition of the present disclosure. Such a pen delivery device can be reusable or disposable. A reusable pen delivery device generally utilizes a replaceable cartridge that contains a pharmaceutical composition. Once all of the pharmaceutical composition within the cartridge has been administered and the cartridge is empty, the empty cartridge can readily be discarded and replaced with a new cartridge that contains the pharmaceutical composition. The pen delivery device can then be reused. In a disposable pen delivery device, there is no replaceable cartridge. Rather, the disposable pen delivery device comes prefilled with the pharmaceutical composition held in a reservoir within the device. Once the reservoir is emptied of the pharmaceutical composition, the entire device is discarded.

[0565] In certain situations, the pharmaceutical composition can be delivered in a controlled release system. In one embodiment, a pump may be used (see Langer, supra; Sefton, 1987, CRC Crit. Ref. Biomed. Eng. 14:201). In another embodiment, polymeric materials can be used; see, Medical Applications of Controlled Release, Langer and Wise (eds.), 1974, CRC Pres., Boca Raton, Florida. In yet another embodiment, a controlled release system can be placed in proximity of the composition's target, thus requiring only a fraction of the systemic dose (see, e.g., Goodson, 1984, in Medical Applications of Controlled Release, supra, vol. 2, pp. 115-138). Other controlled release systems are discussed in the review by Langer, 1990, Science 249:1527-1533.

[0566] The injectable preparations may include dosage forms for intravenous, subcutaneous, intracutaneous, intramuscular, intratumoral, intraperitoneal, intraspinal, intracerebral, and intrathecal injections, drip infusions, etc. In one embodiment, the injectable preparations may be prepared, e.g., by dissolving, suspending, or emulsifying the antibody or its salt described above in a sterile aqueous medium or an oily medium conventionally used for injections. As the aqueous medium for injections, there are, for example, physiological saline, an isotonic solution containing glucose and other auxiliary agents, etc., which may be used in combination with an appropriate solubilizing agent such as an alcohol (e.g., ethanol), a polyalcohol (e.g., propylene glycol, polyethylene glycol), a nonionic surfactant [e.g., polysorbate 80, HCO-50 (polyoxyethylene (50 mol) adduct of hydrogenated castor oil)], etc. As the oily medium, there are employed, e.g., sesame oil, soybean oil, etc., which may be used in combination with a solubilizing agent such as benzyl benzoate, benzyl alcohol, etc. The injection thus prepared is preferably filled in an appropriate ampoule.

[0567] Advantageously, the pharmaceutical compositions for oral or parenteral use described above are prepared into dosage forms in a unit dose suited to fit a dose of the active ingredients. Such dosage forms in a unit dose include, for example, tablets, pills, capsules, injections (ampoules), suppositories, etc. The amount of the antigen-binding proteins described herein may be about 5 to about 500 mg per dosage form in a unit dose; especially in the form of injection, the antigen-binding proteins described herein may be contained in about 5 to about 100 mg and in about 10 to about 250 mg for the other dosage forms.

[0568] The pharmaceutical composition may be administered as needed to a subject. In some embodiments, an effective dose of the pharmaceutical composition is administered to a subject one or more times. In various embodiments, an effective dose of the pharmaceutical composition is administered to the subject once a month, less than once a month, such as, for example, every two months, every three months, or every six months. In other embodiments, an effective dose of the pharmaceutical composition is administered more than once a month, such as, for example, every two weeks, every week, twice per week, three times per week, daily, or multiple times per day. An effective dose of the pharmaceutical composition is administered to the subject at least once. In some embodiments, the effective dose of the pharmaceutical composition may be administered multiple times, including for periods of at least a month, at least six months, or at least a year. In some embodiments, the pharmaceutical composition is administered to a subject as needed to alleviate one or more symptoms of a condition.

[0569] In some embodiments, a pharmaceutical composition of the present disclosure may be administered to a subject at levels lower than that required to achieve the desired therapeutic effect and the dosage may be gradually increased until the desired effect is achieved. Alternatively, a pharmaceutical composition of the present disclosure may be administered at a high dose and subsequently administered progressively lower doses until a therapeutic effect is achieved. In general, a suitable daily dose of an antigen-binding protein of the invention is an amount of the antibody which is the lowest dose effective to produce a therapeutic effect.

[0570] Pharmaceutical compositions of the present disclosure may optionally include more than one active agent. For example, compositions of the present disclosure may contain an anti-TNFR2 antigen-binding protein conjugated to, admixed with, or administered separately from another pharmaceutically active molecule, e.g., Treg cell, or an additional agent that is useful for induction of Treg cell expansion. For instance, an anti-TNFR2 antigen-binding protein may be admixed with one or more additional active agents, such as IL-2 or TNFα, to treat an immunological disease, e.g., a disorder described herein. Alternatively, pharmaceutical compositions of the present disclosure may be formulated for co-administration or sequential administration with one or more additional active agents that can be used to attenuate CD8+ T-cell growth. Examples of additional active agents that can be used to attenuate cytotoxic T-cell proliferation and that can be conjugated to, admixed with, or administered separately from an anti-TNFR2 antigen-binding protein of the present disclosure include cytotoxic agents, e.g., those described herein.

### Treatment Methods and Other Uses

[0571] In one aspect, provided herein is a method of using anti-TNFR2 antigen-binding proteins, fusion proteins, or conjugates of the present disclosure to stimulate the proliferation of a population of regulatory T (Treg) cells (e.g., CD4+, CD25+, FOXP3+ Treg cells). This response may also have the effect of reducing populations of cytotoxic T-lymphocytes (e.g., CD8+ T-cells) that are often associated with mounting an inappropriate immune response that can cause an immunological disorder. In addition, anti-TNFR2 antigen-binding proteins, fusion proteins or conjugates of the present disclosure may synergize with existing Treg proliferating agents, such as IL-2 and TNFα.

[0572] Also provided herein is a method of using anti-TNFR2 antigen-binding proteins, fusion proteins, or conjugates of the present disclosure to activate and/or enhance suppressive function (e.g. inhibition of effector T/B cell function or proliferation or antigen presenting cell function) of a population of Treg cells.

[0573] Further provided herein is a method of using anti-TNFR2 antigen-binding proteins, fusion proteins, or conjugates of the present disclosure to stabilize immunosuppressive phenotype (including stable expression of e.g., FOXP3, HELIOS, CTLA-4) of a population of Treg cells.

[0574] In various embodiments of the above methods, the methods may comprise contacting the population of regulatory T cells with an anti-TNFR2 antigen-binding protein, fusion protein or conjugate described herein. The methods may be carried out in vitro or in vivo. When such methods are carried out in vivo, the methods further comprise administering the anti-TNFR2 antigen-binding protein, fusion protein or conjugate described herein into a subject.

[0575] Tregs are a subset of T cells that play a crucial role in peripheral self-tolerance and the prevention of autoimmunity. Historically, Tregs have been identified as a CD4 subset that specifically express CD25, the high affinity IL-2 receptor alpha chain (Sakaguchi et al., 1995). Subsequently, FOXP3 transcription factor was identified as CD4 Treg's master regulator (Hori et al., 2003). In fact, FOXP3 deficiency leads to systemic autoimmunity in both mouse and human in which it causes the Immunodysregulation polyendocrinopathy enteropathy X-linked (IPEX) syndrome due to Tregs deficiency and unregulated effector T cell function (Bennett et al., 2001). CD4 Tregs can differentiate during T cell development (thymic “tTregs”) or in the periphery (peripheral “pTregs”) under non-inflammatory T cell receptor stimulation (Wing et al., 2019). Numerous subsets have been described including naïve and memory Tregs (Sakaguchi et al., 2020), Th-like Tregs (Halim et al., 2017) as well as CD8 Tregs (Mishra et al., 2021; Niederlova et al., 2021). CD4 Tregs regulate immune response through various mechanisms including the secretion of regulatory cytokines (e.g., IL-10, IL-35, TGF-β), IL-2 scavenging, adenosine production, direct cytotoxicity, and dendritic cell regulation (Vignali et al., 2008). The terms “regulatory T cells” or “Treg” as used herein are meant to encompass all the above-described subsets of regulatory T cells.

[0576] Tregs have enhanced affinity for MHC II-presented self-antigen peptide and have a TCR repertoire that is non-overlapping with effector CD4 T cells (Fazilleau et al., 2007; Hsieh et al., 2006; Pacholczyk et al., 2006). Therefore, self-antigen recognition in the periphery can induce tTregs activation (Moran et al., 2011). Importantly however, once activated, Tregs can suppress effector cells that have different antigen specificity through bystander suppression (Thornton and Shevach, 2000; Yeh et al., 2017; Yu et al., 2005) by regulating antigen presenting cells or soluble factors.

[0577] It has been shown that over time, Tregs retain some plasticity and can lose FOXP3 expression. These so called “ex-Tregs” have increased level of FOXP3 promoter methylation and lower FOXP3 expression compared to Tregs and can acquire effector function (Zhou et al., 2009). In Tregs, the demethylation of FOXP3 promoter, particularly in the “Treg-specific demethylated region” (TSDR) (Huehn et al., 2009), stabilizes gene expression. Likewise, human Tregs exposed to IL-2+ inflammatory cytokines have been shown to lose FOXP3 expression while upregulating RORg and IL-17, a feature associated with TH17 cells. Instability of the Treg phenotype in the presence of inflammatory cytokines can be referred to as “Treg fragility” and is of crucial relevance for therapeutic purpose in autoimmune diseases. Indeed, to induce a long-lasting therapeutic benefit, it is important to stabilize the phenotype and function of Tregs and prevent their conversion to pathogenic cells that further contribute to disease.

[0578] In some embodiments, anti-TNFR2 antigen-binding proteins, fusion proteins or conjugates of the present disclosure may be capable of stimulating the proliferation of a population of Treg cells by between 1% and 100% relative to untreated cells (e.g., about 1%, 2%, 3%, 4%, 5%, 6%, 7%, 8%, 9%, 10%, 15%, 20%, 30%, 40%, 50%, 60%, 70%, 80%, 90%, or 100%), as measured, e.g., by fluorescence activated cell sorting (FACS) analysis. In certain embodiments, anti-TNFR2 antigen-binding proteins, fusion proteins or conjugates of the present disclosure may be capable of reducing the growth of a population of CD8+ T-cells, e.g., by about 10% to about 200% relative to untreated cells (e.g., 10%, 20%, 30%, 40%, 50%, 75%, 100%, 125%, 150%, 175%, or 200%).

[0579] In some embodiments, anti-TNFR2 antigen-binding proteins of the present disclosure can be used to promote the proliferation of a population of Treg cells and thus enhance the immunomodulatory activity of these cells. Anti-TNFR2 antigen-binding proteins of the present disclosure can therefore be used to attenuate an aberrant cell-mediated or humoral immune response associated with a variety of human diseases, such as autoimmune disorders, asthma, allergic reactions, and diseases associated with allograft tolerance. For example, anti-TNFR2 antigen-binding proteins of the present disclosure may be administered to suppress cytotoxic T-cell and B-cell activity, thereby attenuating the response of a subject to a self or benign antigen. Anti-TNFR2 antigen-binding proteins of the present disclosure can be administered to a mammalian subject, such as a human, to attenuate an aberrant immune response, such as a response against a self or non-threatening antigen. Alternatively, anti-TNFR2 antigen-binding proteins of the present disclosure can be used to expand a population of Treg cells ex vivo that have been extracted, e.g., from a patient or an MHC-matched donor. After inducing proliferation of these Treg cells in culture by contacting with an anti-TNFR2 antigen-binding protein of the present disclosure, these cells can subsequently be administered to a subject, e.g., using adoptive cell transfer techniques known in the art or described herein. In this way, anti-TNFR2 antigen-binding proteins of the present disclosure may synergize with existing techniques to suppress humoral and cell-mediated immune responses as a treatment modality for patients suffering from a variety of immunological disorders.

[0580] In some embodiments, anti-TNFR2 antigen-binding proteins of the present disclosure are capable of interacting with and promoting signal transduction events mediated by TNFR2, Anti-TNFR2 antigen-binding proteins of the present disclosure may be able to induce conformational changes within TNFR2 that lead to receptor trimerization. This spatial configuration has been shown to render TNFR2 active for MAPK/TRAF 2/3 signal transduction, which subsequently leads to activation of NF-κB-mediated transcription of genes involved in Treg cell growth and escape from apoptosis (Faustman, et al., Nat Rev Drug Discov. 9:482-493 (2010), the disclosure of which is incorporated herein by reference).

[0581] In some embodiments, anti-TNFR2 antigen-binding proteins of the present disclosure may be capable of increasing the transcription and/or expression of various genes. For example, anti-TNFR2 antigen-binding proteins of the present disclosure may induce the expression of one or more of Akt, clAP2, Etk, TRAF2, VEGFR2, P13K, genes encoding proteins involved in the angiogenic pathway, IKK complexes, RIP, NIK, MAP3K, genes encoding proteins involved in the NF-κB pathway, NIK, JNK, AP-1, a MEK (e.g., MEK1, MEK7), MKK3, NEMO, IL2R, Foxp3, IL2, TNF, and lymphotoxin (e.g., lymphotoxin a and lymphotoxin β). The increase in expression of these genes can be detected using established molecular biology techniques known in the art, e.g., by detecting an increase in mRNA levels by Northern blot analysis or reverse-transcription PCT (RT-PCR) methods, or by detecting an increase in protein levels by immunoblot analysis or ELISA-based techniques. In some embodiments, anti-TNFR2 antigen-binding proteins of the present disclosure may be capable of promoting the activity of one or more proteins associated with the TNFR2 signaling pathway (or related signaling pathways that are activated as a result of TNFR2 signaling). For instance, anti-TNFR2 antigen-binding proteins of the present disclosure may be capable of promoting an increase in the phosphorylation of one or more proteins, such as Akt, clAP2, Etk, TRAF2, VEGFR2, P13K, proteins involved in the angiogenic pathway, IKK complexes, RIP, NIK, MAP3K, proteins involved in the NF-κB pathway, NIK, JNK, AP-1, a MEK (e.g., MEK1, MEK7), MKK3, NEMO, IL2R, Foxp3, IL2, TNF, and lymphotoxin (e.g., lymphotoxin α and lymphotoxin β). An increase in the phosphorylation of one or more proteins that occurs, e.g., as a result of treatment of a subject or of a sample of cells isolated from a subject can be detected using standard molecular biology techniques known in the art, such as by immunoblot analysis or ELISA-based techniques.

[0582] In some embodiments, antigen-binding proteins of the present disclosure increases expression of one or more proteins selected from a protein in the NF-κB pathway, FOXP3, HELIOS, EZH2, HLA-DR, ICAM-1, OX-40, ICOS, and CCR8.

[0583] In another aspect, provided herein is a method of inhibiting an immune response mediated by a B cell or a CD8+ T cell in a subject, the methods including the step of administering to the subject an anti-TNFR2 antigen-binding protein (e.g., antibody such as single-domain antibody), a fusion protein, a conjugate, a polynucleotide molecule, a vector, or a host cell described herein.

[0584] In another aspect, anti-TNFR2 antigen-binding proteins (e.g., antibody such as single-domain antibody), fusion proteins, conjugates, polynucleotide molecules, vectors, and/or host cells described herein, or pharmaceutical compositions thereof, are useful for the (prophylactic or therapeutic) treatment of a wide array of diseases or disorders. Accordingly, the present technology provides an anti-TNFR2 antigen-binding protein (e.g., antibody such as single-domain antibody), a fusion protein, a conjugate, a polynucleotide molecule, a vector, or a host cell for use as a medicament. Also provided is a (prophylactic and/or therapeutic) method of treating a disease or disorder, wherein said method comprises administering, to a subject in need thereof, a pharmaceutically active amount of an anti-TNFR2 antigen-binding protein (e.g., antibody such as single-domain antibody), a fusion protein, a conjugate, a polynucleotide molecule, a vector, or a host cell described herein.

[0585] The diseases or disorder that can be treated with the compositions and methods described herein include, but are not limited to, immunological diseases (e.g., autoimmune diseases), inflammatory diseases, cancers, and cardiovascular diseases (e.g. atherosclerosis, heart failure, left heart failure with reduced ejection fraction, left heart failure with preserved ejection fraction, right ventricular failure, congestive heart failure, restrictive cardiomyopathy, dilated cardiomyopathy, hypertrophic cardiomyopathy, ischemic cardiomyopathy, idiopathic cardiomyopathy, hypertension) Infertility and pregnancy-associated diseases (e.g. recurrent pregnancy loss, pre-eclampsia, preterm labor, fetal growth restriction, intrauterine growth restriction).

[0586] Examples of immunological diseases that can be treated with the compositions and methods described herein include, but are not limited to, autoimmune diseases, allergies, asthma, neurological diseases, metabolic diseases (e.g., diabetes), macular diseases (e.g., macular degeneration), muscular atrophy, diseases related to miscarriage, vascular diseases (e.g., atherosclerosis), diseases related to bone loss (e.g., bone loss as a result of menopause or osteoporosis), blood disorders (e.g., hemophilia), musculoskeletal disorders, diseases related to growth receptor expression or activity, obesity, graft-versus-host disease (GVHD), or allograft rejections.

[0587] In some embodiments, the compositions and methods described herein are used to treat an autoimmune disease. In some embodiments, the autoimmune disease is selected from lupus, alopecia areata, ankylosing spondylitis, antiphospholipid syndrome, autoimmune Addison's disease, autoimmune hemolytic anemia, autoimmune hepatitis, Behcet's disease, bullous pemphigoid, cardiomyopathy, celiac sprue-dermatitis, chronic fatigue immune dysfunction syndrome (CFIDS), chronic inflammatory demyelinating polyneuropathy, Churg-Strauss syndrome, cicatricial pemphigoid, CREST syndrome, cold agglutinin disease, Crohn's disease, essential mixed cryoglobulinemia, fibromyalgia-fibromyositis, Goodpastures disease, Graves' disease, Guillain-Barré, Hashimoto's thyroiditis, hypothyroidism, idiopathic pulmonary fibrosis, idiopathic thrombocytopenia purpura (ITP), IgA nephropathy, juvenile arthritis, lichen planus, lichen sclerosis, IgG4-related disease, Meniere's disease, mixed connective tissue disease, multiple sclerosis, myasthenia gravis, neuromyelitis optica spectrum disease, pemphigus vulgaris or related blistering skin disease, pernicious anemia, polyarteritis nodosa, polychondritis, polyglandular syndromes, polymyalgia rheumatica, polymyositis and dermatomyositis, premature ovarian failure, primary agammaglobulinemia, primary biliary cirrhosis, psoriasis, primary ovarian insufficiency, Raynaud's phenomenon, Reiter's syndrome, rheumatic fever, rheumatoid arthritis, sarcoidosis, scleroderma, Sjögren's syndrome, spondyloarthritis, stiff-man syndrome, type I diabetes, Takayasu arteritis, temporal arteritis/giant cell arteritis, ulcerative colitis, uveitis, vasculitis, vitiligo, and Wegener's granulomatosis (Granulomatosis with polyangiitis) or other immune vasculitis.

[0588] In some embodiments, the compositions and methods described herein are used to treat lupus. In some embodiments, the lupus is systemic lupus erythematosus (SLE), cutaneous lupus (including acute cutaneous lupus, chronic cutaneous lupus erythematosus, or discoid lupus erythematosus (DLE) and subacute cutaneous lupus erythematosus), lupus nephritis, neonatal lupus, or drug-induced lupus.

[0589] In some embodiments, the compositions and methods described herein are used to treat allergy. In some embodiments, the allergy is an allergic conjunctivitis, chemical allergy, cosmetic allergy, drug allergy, dust allergy, food allergy, hay fever, hives, mold allergy, pet allergy, poison ivy allergy oak allergy, or seasonal allergy.

[0590] In some embodiments, the compositions and methods described herein are used to treat a neurological condition. In some embodiments, the neurological condition is a brain tumor, a brain metastasis, a spinal cord injury, schizophrenia, epilepsy, Amyotrophic lateral sclerosis (ALS), Alzheimer's disease, Huntington's disease, Parkinson's disease, or stroke.

[0591] In some embodiments, the compositions and methods described herein are used to treat a graft rejection. Without wishing to be bound by theory, anti-TNFR2 antigen-binding proteins of the present disclosure may treat graft rejections, e.g., by binding TNFR2 receptors on the surface of autoreactive CD8+ T-cells that bind antigens presented on the surface of the graft and inducing apoptosis in these CD8+ T-cells, or by inducing the expansion of Treg cells that may subsequently eliminate autoreactive CD8+ T-cells. Examples of graft rejections that can be treated with the compositions and methods described herein include, without limitation, skin graft rejection, bone graft rejection, vascular tissue graft rejection, ligament graft rejection (e.g., anterior cruciate ligament graft rejection, anterior sacroiliac ligament graft rejection, caudal cruciate ligament graft rejection, cranial cruciate ligament graft rejection, cricothyroid ligament graft rejection, dorsal radiocarpal ligament graft rejection, inferior pubic ligament graft rejection, lateral collateral ligament graft rejection, medial collateral ligament graft rejection, palmar radiocarpal ligament graft rejection, patellar ligament graft rejection, periodontal ligament graft rejection, posterior cruciate ligament graft rejection, posterior sacroiliac ligament graft rejection, radial collateral ligament graft rejection, sacrospinous ligament graft rejection, sacrotuberous ligament graft rejection, superior pubic ligament graft rejection, suspensory ligament of the breast graft rejection, suspensory ligament of the lens graft rejection, ulnar collateral ligament graft rejection) and organ graft rejection (e.g., heart, lung, kidney, liver, pancreas, intestine, and thymus graft rejection).

[0592] In some embodiments, the compositions and methods described herein are used to treat a graft-versus-host disease. In some embodiments, the graft-versus-host disease arises from a bone marrow transplant or one or more blood cells such as B-cells, T-cells, basophils, common myeloid progenitor cells, common lymphoid progenitor cells, dendritic cells, eosinophils, hematopoietic stem cells, neutrophils, natural killer cells, megakaryocytes, monocytes, or macrophages.

[0593] In some embodiments, the compositions and methods described herein are used to treat an inflammatory disease. The inflammatory disease may be acute or chronic inflammation. In some embodiments, the inflammatory disease is selected from osteoarthritis, atopic dermatitis, endometriosis, polycystic ovarian syndrome, inflammatory bowel disease, fibrotic lung disease, and cardiac inflammation.

[0594] In some embodiments, the compositions and methods described herein are used to treat a cancer. In some embodiments, the cancer is an adenoid cystic carcinoma, adrenal gland tumor, amyloidosis, anal cancer, appendix cancer, astrocytoma, ataxia-telangiectasia, Beckwith-Wiedemann syndrome, bile duct cancer (cholangiocarcinoma), Birt-Hogg-Dubé syndrome, bladder cancer, bone cancer (sarcoma of bone), brain stem glioma, brain tumor, breast cancer, inflammatory breast cancer, metastatic breast cancer, male breast cancer, Carney complex, central nervous system tumors (brain and spinal cord), cervical cancer, childhood cancer, colorectal cancer, Cowden syndrome, craniopharyngioma, desmoid tumor, desmoplastic infantile ganglioglioma, childhood tumor, ependymoma, esophageal cancer, Ewing sarcoma, eye cancer, eyelid cancer, familial adenomatous polyposis, familial GIST, familial malignant melanoma, familial pancreatic cancer, gallbladder cancer, gastrointestinal stromal tumor (GIST), germ cell tumor (including childhood germ cell tumor), gestational trophoblastic disease, head and neck cancer, hereditary breast and ovarian cancer, hereditary diffuse gastric cancer, hereditary leiomyomatosis and renal cell cancer, hereditary mixed polyposis syndrome, hereditary pancreatitis, hereditary papillary renal carcinoma, HIV/AIDS-related cancer, juvenile polyposis syndrome, kidney cancer, lacrimal gland tumor, laryngeal and hypopharyngeal cancer, acute lymphoblastic leukemia (ALL), acute myeloid leukemia (AML), B-cell prolymphocytic leukemia and hairy cell leukemia, chronic lymphocytic leukemia (CLL), chronic myeloid leukemia (CML), chronic T-cell lymphocytic leukemia, eosinophilic leukemia, Li-Fraumeni syndrome, liver cancer, lung cancer (e.g., non-small cell lung cancer, small cell lung cancer), hodgkin lymphoma, non-hodgkin lymphoma, lynch syndrome, mastocytosis, medulloblastoma (including childhood medulloblastoma), melanoma, meningioma, mesothelioma, multiple endocrine neoplasia type 1, multiple endocrine neoplasia type 2, multiple myeloma, MUTYH (or MYH)-associated polyposis, myelodysplastic syndromes (MDS), nasal cavity and paranasal sinus cancer, nasopharyngeal cancer, neuroblastoma (including childhood neuroblastoma), neuroendocrine tumor of the gastrointestinal tract, neuroendocrine tumor of the lung, neuroendocrine tumor of the pancreas, neuroendocrine tumors, neurofibromatosis type 1, neurofibromatosis type 2, nevoid basal cell carcinoma syndrome, oral and oropharyngeal cancer, osteosarcoma, ovarian, fallopian tube, and peritoneal cancer, pancreatic cancer, parathyroid cancer, penile cancer, Peutz-Jeghers syndrome, pheochromocytoma and paraganglioma, pituitary gland tumor, pleuropulmonary blastoma, prostate cancer, retinoblastoma, rhabdomyosarcoma, salivary gland cancer, Kaposi sarcoma, soft tissue sarcomas, skin cancer (non-melanoma), small bowel cancer, stomach cancer, testicular cancer, thymoma and thymic carcinoma, thyroid cancer, tuberous sclerosis complex, uterine cancer, vaginal cancer, Von Hippel-Lindau syndrome, vulvar cancer, Waldenstrom macroglobulinemia (lymphoplasmacytic lymphoma), Werner syndrome, Wilms tumor, or xeroderma pigmentosum.

[0595] In some embodiments, anti-TNFR2 antigen-binding proteins of the present disclosure can also be used to treat a patient in need of organ repair or regeneration, e.g., by inducing the proliferation of cells within a damaged tissue or organ. While not wishing to be bound by any theory, it is contemplated that agonistic TNFR2 antibodies may stimulate organ repair or regeneration, e.g., by binding TNFR2 on the surface of cells within damaged tissue to induce TRAF2/3- and/or NF-κB-mediated cell proliferation. Examples of tissues and organs that may be induced to regenerate by the use of anti-TNFR2 antigen-binding proteins of the present disclosure include the blood vessels including the aorta, bone, cranial nerves, ear, eye, embryonic structures, heart, heart, hematopoietic system, kidney, small intestine, large intestine, liver, lung, nerves, olfactory gland, pancreas, pituitary gland, peripheral nervous system, central nervous system, spinal cord, salivary gland, structures of the head, testes, thymus, and tongue.

[0596] Additional diseases that can be treated with the compositions and methods of the present disclosure include genetic diseases with an immunological phenotype. Exemplary genetic diseases with an immunological phenotype are described in, e.g., Table S2 of Tangye et al., Journal of Clinical Immunology volume 42, pages 1473-1507 (2022), which is incorporated herein by reference in its entirety.

[0597] In some embodiments, patients receiving an anti-TNFR2 treatment of the present disclosure can be monitored for their responsiveness to the treatment. For example, a physician may monitor the response of a mammalian subject (e.g., a human) to treatment with anti-TNFR2 antigen-binding proteins of the present disclosure by analyzing the quantity of IFNγ secreted by CD8+ T-cells within a particular patient. For example, a composition of the present disclosure may be capable of reducing IFNγ secretion by between 1% and 100% (e.g., 1%, 5%, 10%, 20%, 30%, 40%, 50%, 60%, 70%, 80%, 90%, 95%, 99%, or 100%). Alternatively, a physician may monitor the responsiveness of a subject (e.g., a human) to treatment with a composition of the present disclosure by analyzing the Treg cell population in the lymph of a particular subject. For example, a physician may withdraw a sample of blood from a mammalian subject (e.g., a human) and determine the quantity or density of a population of Treg cells (e.g., CD4+ CD25+ FOXP3+ Treg cells or CD17+ Treg cells) using established procedures, such as FACS analysis. In such embodiments, high counts of Treg cells can be indicative of efficacious therapy, while lower Treg cell counts may indicate that the patient is to be prescribed or administered higher dosages of the anti-TNFR2 antigen-binding protein of the present disclosure until, e.g., an ideal Treg cell count is achieved. In addition, a physician of skill in the art may monitor the effect of treatment by administration of a composition of the present disclosure to a subject suffering from an immunological disorder, such as an autoimmune disease described herein, by analyzing the quantity of autoreactive CD8+ T-cells within a lymph sample isolated from the patient. Anti-TNFR2 antigen-binding proteins of the invention may attenuate the proliferation of autoreactive T-cells, e.g., by binding TNFR2 at the surface of an autoreactive T-cell and inducing apoptosis, and/or by stimulating the expansion of Treg cells that subsequently eliminate autoreactive T lymphocytes. Treatment with anti-TNFR2 antigen-binding proteins may lead to reduced quantities of autoreactive T-cells within the lymph isolated from a patient receiving treatment, and a rapid decline in the population of autoreactive T-cells in a lymph sample isolated from such a patient may indicate effective treatment. In cases where a lymph sample isolated from a patient exhibits an autoreactive T-cell count that has not declined in response to agonistic TNFR2 antibody therapy, a physician may prescribe the patient higher doses of the antibody or an antigen-binding fragment thereof or may administer the anti-TNFR2 antigen-binding proteins with higher frequency, e.g., multiple times per day, week, or month.

[0598] Anti-TNFR2 antigen-binding proteins described herein may be administered as a monotherapy or in combination with one or more additional therapeutic agents.

[0599] In some embodiments, anti-TNFR2 antigen-binding proteins of the present disclosure may also be admixed, conjugated, or administered with, or administered separately from, another agent that promotes Treg cell proliferation. Additional agents that can be used to promote Treg cell expansion include, e.g., IL-2 and TNFα, the cognate ligand for TNFR2.

[0600] In some embodiments, pharmaceutical compositions of the invention may be formulated for co-administration or sequential administration with one or more additional active agents that can be used to inhibit CD8+ T-cell growth. Examples of additional active agents that can be used to inhibit cytotoxic T-cell proliferation and that can be conjugated to, admixed with, or administered separately from an anti-TNFR2 antigen-binding protein of the present disclosure include cytotoxic agents, e.g., those described herein.

[0601] Exemplary cytotoxic agents that can be conjugated to, admixed with, or administered separately from anti-TNFR2 antigen-binding protein of the present disclosure include, but not limited to, 13-cis retinoic acid, 14-hydroxy-retro-retinol, 2-chloro-2′-deoxyadenosine, 2-Chloro-2′-arabino-fluoro-2′-deoxyadenosine, 2-chlorodeoxyadenosine, 2-chlorodeoxyadenosine (2-Cda), 2′-deoxycoformycin, 3-methyl TTNEB, 6-mercaptopurine, 6-thioguanine, 9-aminocamptothecin, 9-cis retinoic acid, aclarubicin, acodazole hydrochloride, acronine, adozelesin, adozelesin, adriamycin, aldesleukin, all-trans retinoic acid, all-trans retinol, altretamine, ambomycin, ametantrone acetate, aminoglutethimide, amsacrine, amsacrine, anastrozole, anisomycin, anthramycin, acivicin, asparaginase, asperlin, azacitidine, azacitidine, azetepa, azotomycin, AZQ, batimastat, benzodepa, bicalutamide, Bis (platinum), bisantrene hydrochloride, bisnafide dimesylate, bizelesin, bleomycin sulfate, brequinar sodium, bropirimine, busulfan, busulfan, cactinomycin, calusterone, camptothecin, caracemide, carbetimer, carboplatin, carboplatin, carmustine, carubicin hydrochloride, carzelesin, cedefingol, CEP-751, chlorambucil, chlorambucil, cirolemycin, cisplatin, cisplatin, cladribine, combretestatin a-4, C1-973, CPT-11, crisnatol mesylate, cyclophosphamide, cyclophosphamide, cytarabine, cytarabine, daca (n-[2-(dimethyl-amino) ethyl] acridine-4-carboxamide), dacarbazine, dactinomycin, Dactinomycin (Actinomycin D), darubicin, daunomycin, Daunomycin, daunorubicin hydrochloride, decitabine, dexormaplatin, dezaguanine, dezaguanine mesylate, diacarbazine (DTIC), diaziquone, docetaxel, dolasatins, doxorubicin, Doxorubicin, doxorubicin hydrochloride, droloxifene, droloxifene citrate, dromostanolone propionate, duazomycin, DWA 2114R, edatrexate, eflornithine hydrochloride, ellipticine, elsamitrucin, enloplatin, enpromate, epipropidine, Epirubicin, epirubicin hydrochloride, erbulozole, esorubicin hydrochloride, estramustine, estramustine phosphate sodium, etanidazole, ethiodized oil i 131, etoposide, etoposide phosphate, etoprine, fadrozole hydrochloride, fazarabine, fenretinide, floxuridine, fludarabine (2-F-ara-AMP), fludarabine phosphate, fluorodeoxyuridylate, fluorouracil, flurocitabine, fosquidone, fostriecin sodium, gemcitabine, gemcitabine, gemcitabine hydrochloride, gold ¹⁹⁸AU, homocamptothecin, hPRL-G129R, hydroxyurea, hypoxanthine, idarubicin hydrochloride, ifosfamide, ifosfamide, ilmofosine, interferon γ-1b, Interferon α-2b, interferon α-n1, interferon α-n3, interferon α-2a, interferon β-1a, iproplatin, irinotecan hydrochloride, JM216, JM335, lanreotide acetate, letrozole, leuprolide acetate, liarozole hydrochloride, linomide, lometrexol sodium, lomustine, losoxantrone, losoxantrone hydrochloride, masoprocol, maytansine, mechlorethamine hydrochloride, megestrol acetate, melengestrol acetate, melphalan, melphalan, menogaril, mercaptopurine, methotrexate, methotrexate sodium, metoprine, meturedepa, mitindomide, mitocarcin, mitocromin, mitogillin, mitomalcin, mitomycin, mitomycin C, mitosper, mitotane, mitoxantrone, mitoxantrone hydrochloride, mitozolomide, mycophenolic acid, N-(2-chloroethyl)-N′ cyclohexyl-N-nitrosourea (CCNU), N-(2-chloroethyl)-N′-(diethyl)ethylphosphonate-N-nitrosourea (fotemustine), N-(2-chloroethyl)-N′-(trans-4-methylcyclohexyl-N-nitrosourea (MeCCNU), N-(4-hydroxyphenyl) retinamide, N,N′-Bis (2-chloroethyl)-N-nitrosourea (BCNU), nitrogen mustard (mechlor ethamine), N-methyl-Nnitrosourea (MNU), nocodazole, nogalamycin; ormaplatin, N-propargyl-5,8-dideazafolic acid, ormaplatin, oxaliplatin, oxisuran, paclitaxel, pegaspargase, peliomycin, pentamustine, peploycinsulfate, perfosfamide, pipobroman, piposulfan, piroxantrone hydrochloride, plicamycin, plomestane, porfimer sodium, porfiromycin, prednimustine, procarbazine hydrochloride, puromycin, puromycin hydrochloride, pyrazofurin, pyrazoloacridine, raltitrexed, rhizoxin, rhizoxin d, riboprine, rogletimide, safingol, safingol hydrochloride, semustine, simtrazene, sparfosate sodium, sparsomycin, spirogermanium hydrochloride, spiromustine, spiroplatin, streptonigrin, streptozocin, streptozotocin, strontium chloride Sr 89, sulfur mustard, sulofenur, talisomycin, taxane, taxoid, tecogalan sodium, tegafur, teloxantrone hydrochloride, temoporfin, temozolomide, teniposide, teniposide 9-amino camptothecin, teroxirone, testolactone, thiamiprine, thioguanine, thiotepa, thiotepa, thymitaq, tiazofurin, tirapazamine, tomudex, tomudex, TOP-53, topotecan, topotecan hydrochloride, toremifene citrate, trestolone acetate, trichostatin A, triciribine phosphate, trimetrexate, trimetrexate glucuronate, triptorelin, tubulozole hydrochloride, uracil mustard, uredepa, vapreotide, verteporfin, vinblastine, vinblastine sulfate, vincristine, vincristine sulfate, vindesine, vindesine sulfate, vinepidine sulfate, vinglycinate sulfate, vinleurosine sulfate, vinorelbine tartrate, vinrosidine sulfate, vinzolidine sulfate, vorozole, zeniplatin, zinostatin, or zorubicin hydrochloride.

[0602] Other therapeutic agents that can be conjugated to, admixed with, or administered separately from anti-TNFR2 antigen-binding protein of the present disclosure include, but are not limited to, 2′ deoxycoformycin (DCF), 1,25 dihydroxyvitamin D3, 5-ethynyluracil, 9-dioxamycin, abiraterone, acylfulvene, adecypenol, ALL-TK antagonists, ambamustine, amidox, amifostine, aminolevulinic acid, amrubicin, anagrelide, andrographolide, angiogenesis inhibitors, antagonist D, antagonist G, antarelix, antiandrogen, prostatic carcinoma, anti-dorsalizing morphogenetic protein-1, antiestrogen, antineoplaston, antisense oligonucleotides, aphidicolin glycinate, apoptosis gene modulators, apoptosis regulators, apurinic acid, ara-CDP-DL-PTBA, argininedeaminase, asulacrine, atamestane, atrimustine, axinastatin 1, axinastatin 2, axinastatin 3, azasetron, azatoxin, azatyrosine, baccatin III derivatives, balanol, BCR/ABL antagonists, benzochlorins, benzoylstaurosporine, beta lactam derivatives, beta-alethine, betaclamycin B, betulinic acid, bFGF inhibitor, bisantrene, bisaziridinylspermine, bisnafide, bistratene A, bleomycin A2, bleomycin 82, breflate, budotitane, buthionine sulfoximine, calcipotriol, calphostin C, camptothecin derivatives (e.g., 10-hydroxy-camptothecin), canarypox IL-2, capecitabine, carboxamide-amino-triazole, carboxyamidotriazole, CaRest M3, CARN 700, cartilage derived inhibitor, casein kinase inhibitors (ICOS), castanospermine, cecropin B, cetrorelix, chlorins, chloroquinoxaline sulfonamide, cicaprost, cis-porphyrin, clomifene analogues, clotrimazole, collismycin A, collismycin B, combretastatin A4, combretastatin analogue, conagenin, crambescidin 816, crisnatol, cryptophycin 8, cryptophycin A derivatives, curacin A, cyclopentanthraquinones, cycloplatam, cypemycin, cytarabine ocfosfate, cytolytic factor, cytostatin, dacliximab, dehydrodidemnin B, deslorelin, dexifosfamide, dexrazoxane, dexverapamil, didemnin B, didox, diethylnorspermine, dihydro-5-azacytidine, dihydrotaxol, diphenyl spiromustine, discodermolide, docosanol, dolasetron, doxifluridine, dronabinol, duocarmycin SA, ebselen, ecomustine, edelfosine, edrecolomab, eflornithine, elemene, emitefur, epithilones, epothilones (A, R=H; B, R=Me), epristeride, erythrocyte gene therapy, estramustine analogue, estrogen agonists, estrogen antagonists, etoposide 4′-phosphate (etopofos), exemestane, fadrozole, filgrastim, finasteride, flavopiridol, flezelastine, fluasterone, fludarabine, fluorodaunorunicin hydrochloride, forfenimex, formestane, fostriecin, fotemustine, gadolinium texaphyrin, gallium nitrate, galocitabine, ganirelix, gelatinase inhibitors, glutathione inhibitors, hepsulfam, heregulin, hexamethylene bisacetamide, homoharringtonine (HHT), hypericin, ibandronic acid, idarubicin, idoxifene, idramantone, ifepristone, ilomastat, imidazoacridones, imiquimod, immunostimulant peptides, insulin-like growth factor-1 receptor inhibitor, interferon agonists, interferons, interleukins, iobenguane, iododoxorubicin, ipomeanol, irinotecan, iroplact, irsogladine, isobengazole, isohomohalicondrin B, itasetron, jasplakinolide, kahalalide F, lamellarin-N triacetate, lanreotide, leinamycin, lenograstim, lentinan sulfate, leptolstatin, leukemia inhibiting factor, leukocyte alpha interferon, leuprolide+estrogen+progesterone, leuprorelin, levamisole, liarozole, linear polyamine analogue, lipophilic disaccharide peptide, lipophilic platinum compounds, lissoclinamide 7, lobaplatin, lombricine, lometrexol, lonidamine, lovastatin, loxoribine, lurtotecan, lutetium texaphyrin, lysofylline, lytic peptides, mannostatin A, marimastat, maspin, matrilysin inhibitors, matrix metalloproteinase inhibitors, meterelin, methioninase, metoclopramide, MIF inhibitor, miltefosine, mirimostim, mismatched double stranded RNA, mithracin, mitoguazone, mitolactol, mitomycin analogues, mitonafide, mitotoxin fibroblast growth factor-saporin, mofarotene, molgramostim, monoclonal antibody, human chorionic gonadotrophin, monophosphoryl lipid A+myobacterium cell wall sk, mopidamol, multiple drug resistance gene inhibitor, multiple tumor suppressor 1-based therapy, mustard anticancer agent, mycaperoxide B, mycobacterial cell wall extract, myriaporone, N-acetyldinaline, nafarelin, nagrestip, naloxone+pentazocine, napavin, naphterpin, nartograstim, nedaplatin, nemorubicin, neridronic acid, neutral endopeptidase, nilutamide, nisamycin, nitric oxide modulators, nitroxide antioxidant, nitrullyn, N-substituted benzamides, O6-benzylguanine, octreotide, okicenone, oligonucleotides, onapristone, ondansetron, oracin, oral cytokine inducer, osaterone, oxaliplatin, oxaunomycin, paclitaxel analogues, paclitaxel derivatives, palauamine, palmitoylrhizoxin, pamidronic acid, panaxytriol, panomifene, parabactin, pazelliptine, peldesine, pentosan polysulfate sodium, pentostatin, pentrozole, perflubron, perillyl alcohol, phenazinomycin, phenylacetate, phosphatase inhibitors, picibanil, pilocarpine hydrochloride, pirarubicin, piritrexim, placetin A, placetin B, plasminogen activator inhibitor, platinum complex, platinum compounds, platinum-triamine complex, podophyllotoxin, propyl bis-acridone, prostaglandin J2, proteasome inhibitors, protein A-based immune modulator, protein kinase C inhibitor, protein kinase C inhibitors, microalgal, protein tyrosine phosphatase inhibitors, purine nucleoside phosphorylase inhibitors, purpurins, pyridoxylated hemoglobin polyoxyethylene conjugate, raf antagonists, ramosetron, ras farnesyl protein transferase inhibitors, ras inhibitors, ras-GAP inhibitor, retelliptine demethylated, rhenium Re 186 etidronate, ribozymes, RII retinamide, rnerbarone, rohitukine, romurtide, roquinimex, rubiginone B 1, ruboxyl, saintopin, SarCNU, sarcophytol A, sargramostim, Sdi 1 mimetics, senescence derived inhibitor 1, sense oligonucleotides, signal transduction inhibitors, signal transduction modulators, single chain antigen-binding protein, sizofiran, sobuzoxane, sodium borocaptate, sodium phenylacetate, solverol, somatomedin binding protein, sonermin, sparfosic acid, spicamycin D, splenopentin, spongistatin 1, squalamine, stem cell inhibitor, stem-cell division inhibitors, stipiamide, stromelysin inhibitors, sulfinosine, superactive vasoactive intestinal peptide antagonist, suradista, suramin, swainsonine, synthetic glycosaminoglycans, tallimustine, tamoxifen methiodide, tauromustine, tazarotene, tellurapyrylium, telomerase inhibitors, tetrachlorodecaoxide, tetrazomine, thaliblastine, thalidomide, thiocoraline, thrombopoietin, thrombopoietin mimetic, thymalfasin, thymopoietin receptor agonist, thymotrinan, thyroid stimulating hormone, tin ethyl etiopurpurin, titanocene dichloride, topsentin, toremifene, totipotent stem cell factor, translation inhibitors, tretinoin, triacetyluridine, triciribine, tropisetron, turosteride, tyrosine kinase inhibitors, tyrphostins, UBC inhibitors, ubenimex, urogenital sinus-derived growth inhibitory factor, urokinase receptor antagonists, variolin B, velaresol, veramine, verdins, vinorelbine, vinxaltine, vitaxin, zanoterone, zilascorb, or zinostatin stimalamer.

[0603] In some embodiments, anti-TNFR2 antigen-binding proteins of the present disclosure may be admixed, conjugated, or administered with, or administered separately from, an anti-inflammatory agent. Exemplary anti-inflammatory agents useful in conjunction with the compositions and methods of the invention include steroids, colchicine, hydroxychloroquine, sulfasalazine, dapsone, methotrexate, mycophenolate mofetil, azathioprine, cyclosporine, sirolimus, everolimus, azathioprine, leflunomide, mycophenolate, inhibitors of IL-1/IL-2/1L-4/1L5/IL-6/IL-13/IL-17/IL-23/TNF/complement/BAFF/interferon/JAK/CD28/IgE/Integrins/T cell costimulation pathway or B-cell depleting agents.

[0604] In some embodiments, anti-TNFR2 antigen-binding proteins of the present disclosure may be admixed, conjugated, or administered with, or administered separately from, an immunotherapy agent. Exemplary immunotherapy agents useful in conjunction with the compositions and methods of the invention include an anti-CTLA-4 agent, an anti-PD-1 agent, an anti-PD-L1 agent, an anti-PD-L2 agent, a TNFα cross-linking agent, a TRAIL cross-linking agent, an anti-CD27 agent, an anti-CD30 agent, an anti-CD40 agent, an anti-4-1BB agent, an anti-GITR agent, an anti-OX40 agent, an anti-TRAILR1 agent, an anti-TRAILR2 agent, an anti-TWEAKR agent, an anti-TL1A agent, an anti-LIGHT agent, an anti-BTLA agent, an anti-LAG3 agent, an anti-Siglecs agent, an anti-ICOS ligand agent, an anti-87-H3 antibody; an anti-B7-H4 agent; an anti-VISTA agent; an anti-TMIGD2 agent; an anti-BTNL2 agent; an anti-CD48 agent; an anti-KIR agent; an anti-LIR agent; an anti-ILT agent; an anti-NKG2D agent; an anti-NKG2A agent; an anti-MICA agent; an anti-MICB agent; an anti-CD244 agent; an anti-CSF1 R agent; an anti-IDO agent; an anti-TGFβ agent; an anti-CD39 agent; an anti-CD73 agent; an anti-CXCR4 agent; an anti-CXCL12 agent; an anti-SIRPA agent; an anti-CD47 agent; an anti-VEGF agent; and an anti-neuropilin agent and, e.g., agents directed toward the immunological targets described in Table 1 of Mahoney et al., Cancer Immunotherapy, 14:561-584 (2015), the disclosure of which is incorporated herein by reference. The immunotherapy agent described herein may be, for example, an antibody, a small molecule, or a chimeric antigen receptor.

[0605] In some embodiments, anti-TNFR2 antigen-binding protein of the present disclosure can also be admixed with, co-administered with, or administered separately from Bacillus Calmette-Guérin (BCG), a bacterial strain that has been used to treat a variety of immunological disorders, such as type I diabetes, multiple sclerosis, scleroderma, Sjogren's disease, systemic lupus erythematosus, Grave's disease, hypothyroidism, Crohn's disease, colititis, an autoimmune skin disease, and rheumatoid arthritis, among others. For instance, anti-TNFR2 antigen-binding protein of the present disclosure may be included in a therapeutic regimen in combination with BCG for the treatment of an immunological disorder (e.g., one of those described above, such as type I diabetes or rheumatoid arthritis). The anti-TNFR2 antigen-binding protein may be co-administered with BCG, e.g., by an injection route described herein. Alternatively, the anti-TNFR2 antigen-binding protein may be administered separately from a BCG-containing composition. The use of BCG to treat immunological disorders has been described, e.g., in U.S. Pat. Nos. 6,660,487; and 6,599,710; the disclosures of each of which are incorporated herein by reference in its entirety.

### EXAMPLES

[0606] The following examples are provided to further describe some of the embodiments disclosed herein. The examples are intended to illustrate, not to limit, the disclosed embodiments.

### Example 1. Camelid Immunization

[0607] Three alpacas were immunized by four subcutaneous injections with recombinant human TNFR2 (10417-H08H, Sino Biologicals) and complete/incomplete Freund's or Gerbu FAMA adjuvant using standard protocols to elicit a humoral immune response that included the generation of antigen-specific conventional and heavy-chain only (VHH) antibodies.

[0608] Before the first and after the third injection, serum was prepared from blood samples. Antibody induction was monitored by comparing antigen-specific antibody titers in the sera before and after immunization by enzyme-linked immunosorbent assay (ELISA). Briefly, 96-well Maxisorp plates were coated with human TNFR2 (10417-H08H, Sino Biologicals), blocked, and incubated with diluted serum samples. TNFR2-specific antibodies were bound by alkaline phosphatase-conjugated goat anti-alpaca IgG (H+L) (Jackson ImmunoResearch, Cat. No. 128-055-160) and detected using p-Nitrophenyl Phosphate.

### Example 2. Phage Library Construction

[0609] Four to ten days after the fourth injection in accordance with procedures described in Example 1, blood samples were collected, and four to six days after the fourth injection a bone marrow sample was aspirated. Peripheral blood mononuclear cells (PBMCs) were isolated from heparinized blood or bone marrow following density gradient purification with Ficoll-Paque™ Plus. Total RNA was extracted from freshly isolated PBMCs.

[0610] To generate VHH immune libraries, total RNA was reverse transcribed to cDNA using random hexamer primers. Conventional and heavy chain IgH cDNA fragments were amplified by polymerase chain reaction (PCR) using primers annealing to the IgH leader sequence region and the CH2 region. The resulting amplicons represented the VHH and VH cDNAs, respectively. The VHH fragment was isolated and used as template for a nested PCR to introduce appropriate endonuclease recognition sites for cloning into the pQ81 phagemid in frame with gene III. Libraries were transformed into electrocompetent E. coli TG1 cells. In total, six libraries were built, with 95.5% to 100% VHH insert frequency and maximum library sizes between 4.2×10⁸ and 2.4×10⁹. Phage for phage display was prepared following standard protocols.

[0611] Binders to human and mouse TNFR2 were enriched from VHH immune libraries by two rounds of phage display. The general panning strategy is illustrated in FIG. 1 using the panning substrates listed Table 3. For the Table below: Hu, Human; Ms, mouse; PBS, phosphate buffered saline; Cat., catalog; MW, molecular weight; Calc., Calculated; Seq., Sequence; N-term., N-terminal; aa, amino acid.

TABLE 3
Panning substrates

| | | | | | | | N-term. | |
|---|---|---|---|---|---|---|---|---|
| | | | | | | | Seq., aa | |
| Species | Modification | Buffer | Cat. # | Lot # | Vendor | MW | Seq. | Source |
| Human | His-tag | PBS, | 10417- | MB15AU1103 | Sino | calc. | Leu23- | HEK293 |
| | | pH 7.4 | H08H | | | 26.7 kDa, | Asp257 | |
| | | | | | | apparent | | |
| | | | | | | 42-45 kDa | | |
| Mouse | His-tag | PBS, | 50128- | MB11DE1903 | Sino | calc. | Val23- | HEK293 |
| | | pH 7.4 | M08H | | | 26.8 kDa, | Gly258 | |
| | | | | | | apparent | | |
| | | | | | | 45 kDa | | |

[0612] For the first panning round, libraries originating from the first harvested blood sample and the first harvested bone marrow sample of the same animal were pooled in equal parts (at the phage level), resulting in three pooled input libraries per antigen. Each library was panned under four conditions (two antigen concentrations and two ways of antigen immobilization) with human TNFR2, resulting in 12 panning reactions. For the second rounds of panning, six output samples (enriched libraries) from the first round were chosen and served as input libraries for the second round. Preferentially, the enriched libraries from the higher panning substrate concentration were chosen to preserve maximum diversity. Pannings of the second round were performed with three antigen concentrations of human and mouse antigen to result 24 conditions. Three antigen concentrations for TNFR2 were further chosen to recover binders with lower affinity. This panning regimen was implemented to identify binders that cross-reacted with human and mouse TNFR2.

[0613] In some cases, binders with medium affinity were preferred since higher valency may drive avidity. Thus, the antigen concentrations in the second panning round were the same, one tenth and one hundredth of the first round.

[0614] Phages were produced according to QVQ Holding B.V. (QVQ) standard operating procedures (SOPs) and phage titers were determined to ensure at least 10-fold excess over the maximum diversity of the libraries. Panning substrates were commercially purchased (see Table 1). The panning substrates were immobilized either by direct coating on enzyme-linked immunoassay (ELISA) plates or by binding of biotinylated antigen on neutravidin-coated ELISA plate. Glycerol stocks were prepared from all outputs and are stored at −80° C.

[0615] Panning outputs were analyzed by random clone picking/periplasmic extract (PE)-ELISA/Sanger sequencing (QVQ) and next-generation sequencing (NGS; Genewiz/PipeBio).

[0616] For random colony picking, rescued outputs of the first and second panning rounds were plated out and 920 random single clones (equal numbers of colonies from each condition) were selected to create masterplates (96-well format). From the masterplates, expression cultures in deep-well plates were inoculated to produce periplasmic extracts containing monoclonal VHH. Periplasmic extracts were used to determine binding of individual VHHs to human, mouse and cynomolgus antigen by ELISA. For conditions where the panning substrate was biotinylated and captured by neutravidin, background binders were identified by ELISA with neutravidin. All masterplates were sequenced by the Sanger method.

[0617] For NGS analysis, minipreps from input libraries and outputs after the first and second rounds of panning were prepared, amplified by PCR, and sequenced by NGS.

### Example 3. Next-Generation Sequencing

[0618] Following two rounds of panning, phages were eluted and corresponding phagemid DNA was extracted. Identification of initial V-body candidates was performed in a parallelized fashion, employing a random colony picking, as well as a next-generation sequencing (NGS) approach, as orthogonal techniques to yield a particularly diverse set of initial candidates. Prior to NGS techniques, random colony picking was the prevalent method for initial hit identification, which involved transformation of a phagemid pool (from a panning elution) and selection of individual bacterial colonies to isolate single clones. Following this approach, 920 single colonies were randomly picked from the 36 samples of the second panning round (FIG. 2). Then, individual clones were expressed and subject to ELISA screening against the target antigen to select for antigen binding V-bodies, which were further functionally characterized.

[0619] All panning eluates were sequenced using NGS. In brief, the entire VHH region was PCR-amplified from isolated phagemid pools by primers annealing to universal phagemid sequences 5′ and 3′ of the VHH-encoding region. In a second step, the generated amplicons were fused to sequencing-compatible and sample-specific barcodes. By fusing unique barcodes, it was possible to multiplex hundreds of different samples. Following the preparation of 51 samples, an Illumina NovaSeq 6000 with an SP flowcell was employed for sequencing, yielding 250 base pair (bp) reads from each direction and a total of ~600 million reads. To account for differences in the number of expected unique sequences in the library, and both panning rounds, each library was sequenced with a total of 20 million reads, compared to the first and second round of panning with 2 million reads each. This strategy allowed for covering sufficient sequence space in the libraries, as well as in the panning eluates. A spike-in of 30% of a standard PhiX reference genome control into the sequencing reaction helped to provide a technical quality control for assessing sequencing accuracy. The NGS raw data contained multiplexed sequencing reads, which were de-multiplexed based on the sample-specific barcodes. The de-multiplexed data containing unmerged sequencing reads were then processed by employing an NGS analysis platform. In brief, forward and reverse sequence pairs were merged by their overlapping sequence, thereby generating a full VHH sequence from two half sequences (FIG. 3). The framework regions, CDRs, and sequence-specific liabilities were then annotated for the merged V-body sequences.

[0620] Based on CDR3 identity, V-body sequences were clustered, allowing for a detailed analysis of V-body enrichment during phage display, sequence diversity, CDR3 length distribution and cluster abundance. Identified V-bodies can be classified into eleven distinct clusters, as follows: 31G3-31D6 (group A), 37C7 (group B), 31G11 (group C), 33D4 (group D), N1277 (group G), N1364-N1365 (group J), 35A10-N1402-N1400 (group K), N1425 (group L), N1409 (group M), N1323 (group N), and 33B1 (group O). The following Table 4-1 to Table 4-33 display the amino acid frequency distribution at each amino acid (AA) position (IMGT) for CDR1, CDR2 and CDR3 for the eleven clusters. Table 5 provides the sequence identifiers of amino acid sequences of the complementarity determining regions (CDR1, CDR2 and CDR3), amino acid and DNA sequences of the full-length VHH domain for the identified V-bodies.

TABLE 4-1
CDR1 amino acid frequency distribution
for cluster 31G3-31D6 (Group A)

| | Position | | | | | | | |
|---|---|---|---|---|---|---|---|---|
| AA | 27 | 28 | 29 | 30 | 35 | 36 | 37 | 38 |
| A | 0 | 0 | 0 | 0 | 0 | 5.3 | 0 | 36 |
| C | 0 | 0 | 0 | 0 | 0 | 0 | 0 | 0 |
| D | 0 | 0 | 0 | 0 | 0 | 0.3 | 4.7 | 0 |
| E | 0 | 0 | 0 | 0 | 0 | 0 | 0 | 0 |
| F | 0 | 0.3 | 0 | 28 | 0 | 7 | 0 | 0 |
| G | 100 | 0.3 | 0 | 0 | 1 | 1.7 | 0 | 44 |
| H | 0 | 0 | 0 | 0 | 0 | 0 | 0 | 0 |
| I | 0 | 0 | 95 | 0 | 0 | 1.3 | 0 | 0 |
| K | 0 | 0 | 0 | 0 | 0 | 0 | 6.3 | 0 |
| L | 0 | 0 | 0 | 0.3 | 0 | 11 | 0 | 0 |
| M | 0 | 0 | 0 | 0 | 0 | 0 | 0 | 0 |
| N | 0 | 1 | 0 | 0.3 | 1.3 | 0 | 83 | 1.3 |
| P | 0 | 0 | 0 | 0 | 0 | 0 | 0 | 0 |
| Q | 0 | 0 | 0 | 0 | 0 | 0 | 0 | 0 |
| R | 0 | 3 | 3.3 | 1 | 4.7 | 0 | 5 | 0 |
| S | 0 | 95 | 0 | 1 | 93 | 4 | 0.7 | 19 |
| T | 0.3 | 0 | 0.7 | 0 | 0 | 69 | 0 | 0 |
| V | 0 | 0.3 | 0.7 | 69 | 0 | 0 | 0 | 0 |
| W | 0 | 0 | 0 | 0 | 0 | 0 | 0 | 0 |
| Y | 0 | 0 | 0 | 0 | 0 | 0 | 0.3 | 0 |

TABLE 4-2
CDR2 amino acid frequency distribution
for cluster 31G3-3106 (Group A)
Position

| AA | 56 | 57 | 58 | 59 | 63 | 64 | 65 |
|---|---|---|---|---|---|---|---|
| A | 0 | 0 | 0 | 0 | 0 | 0 | 10 |
| C | 0 | 0 | 0 | 0 | 0 | 0 | 0 |
| D | 0 | 0 | 0 | 88 | 1.7 | 0 | 0 |
| E | 0 | 0 | 0 | 0 | 0.3 | 0.7 | 1 |
| F | 8 | 0 | 0 | 0 | 0 | 73 | 0 |
| G | 0 | 0 | 0 | 0 | 97 | 0 | 0 |
| H | 0 | 2 | 0 | 0 | 0 | 0 | 0 |
| I | 88 | 0 | 0 | 0 | 0 | 2.7 | 20 |
| K | 0 | 0 | 0 | 0 | 0 | 0 | 0 |
| L | 3.3 | 0 | 0 | 0 | 0 | 4.7 | 0.3 |
| M | 0.7 | 0 | 0 | 0 | 0 | 14 | 0 |
| N | 0 | 1.3 | 0 | 12 | 0 | 0 | 0 |
| P | 0 | 0 | 0 | 0 | 0 | 0 | 0.7 |
| Q | 0 | 0.7 | 0 | 0 | 0 | 0 | 0 |
| R | 0 | 96 | 0.3 | 0 | 0 | 0 | 0 |
| S | 0 | 0 | 99 | 0 | 1 | 0.3 | 0 |
| T | 0 | 0 | 0.7 | 0 | 0 | 0 | 59 |
| V | 0.3 | 0 | 0 | 0 | 0 | 0 | 8.6 |
| W | 0 | 0 | 0 | 0 | 0 | 0 | 0 |
| Y | 0 | 0 | 0 | 0 | 0 | 4.3 | 0 |

TABLE 4-3
CDR3 amino acid frequency distribution for cluster 31G3-3106 (Group A)

| | Position | | | | | | | | | | | | | |
|---|---|---|---|---|---|---|---|---|---|---|---|---|---|---|
| AA | 105 | 106 | 107 | 108 | 109 | 110 | 111 | 112.1 | 112 | 113 | 114 | 115 | 116 | 117 |
| A | 0 | 0 | 0 | 23.9 | 0 | 0 | 2 | 20.6 | 0 | 0 | 0.3 | 0 | 1.7 | 0 |
| C | 0 | 0 | 0 | 0 | 0 | 0 | 0 | 0 | 0 | 0 | 0 | 0 | 0 | 0 |
| D | 0.3 | 5 | 0 | 0 | 0 | 0 | 0 | 0.7 | 1 | 2.3 | 0.3 | 0 | 0 | 0 |
| E | 0 | 0 | 0 | 0 | 0 | 0 | 0 | 0 | 0 | 0 | 0 | 0 | 0 | 0 |
| F | 40.9 | 0 | 0 | 0 | 4 | 0 | 0 | 0 | 0 | 24.3 | 0 | 0 | 0 | 91.7 |
| G | 0 | 0 | 0 | 0 | 0 | 4 | 1.7 | 0 | 0 | 0 | 98.3 | 0 | 0 | 0 |
| H | 0 | 1 | 6.6 | 0 | 1.7 | 0 | 1 | 1.7 | 1 | 0.3 | 0 | 8 | 0 | 0 |
| I | 0.3 | 0 | 0 | 0 | 1 | 0.3 | 0 | 0 | 0.3 | 0 | 0 | 0 | 0 | 3 |
| K | 0 | 0 | 0.3 | 0 | 0 | 0 | 0 | 0 | 5 | 0 | 0 | 1.3 | 0 | 0 |
| L | 0.7 | 0 | 0 | 0 | 90 | 0 | 0 | 0 | 0 | 0 | 0 | 1 | 14.6 | 1 |
| M | 0 | 0 | 0 | 0 | 0 | 0 | 0 | 0 | 0 | 0 | 0 | 0 | 0 | 0 |
| N | 0 | 0 | 0 | 0 | 0 | 0.3 | 0 | 0 | 87 | 0 | 0 | 0 | 0 | 0 |
| P | 0 | 0 | 0 | 2.7 | 0 | 0 | 0 | 75.4 | 0 | 0 | 0 | 0 | 3.3 | 0 |
| Q | 0 | 0 | 93 | 0 | 0 | 0 | 0 | 0 | 0 | 0 | 0 | 86.4 | 0 | 0 |
| R | 0 | 0 | 0 | 0 | 0 | 3.7 | 0 | 0 | 0 | 0 | 0 | 3.3 | 0 | 0 |
| S | 1.7 | 3.7 | 0 | 73.1 | 0 | 85.7 | 42.9 | 0.3 | 2 | 8.6 | 0.7 | 0 | 0 | 1.7 |
| T | 0 | 0 | 0 | 0.3 | 0 | 6 | 52.5 | 0.3 | 3.7 | 0 | 0 | 0 | 36.5 | 0 |
| V | 0 | 0 | 0 | 0 | 0 | 0 | 0 | 1 | 0 | 0.3 | 0.3 | 0 | 43.9 | 0.3 |
| W | 0 | 0 | 0 | 0 | 0 | 0 | 0 | 0 | 0 | 1 | 0 | 0 | 0 | 0 |
| Y | 56.1 | 90.4 | 0 | 0 | 3.3 | 0 | 0 | 0 | 0 | 63.1 | 0 | 0 | 0 | 2.3 |

TABLE 4-4
CDR1 amino acid frequency distribution
for cluster 37C7 (Group B)

| | Position | | | | | | | |
|---|---|---|---|---|---|---|---|---|
| AA | 27 | 28 | 29 | 30 | 35 | 36 | 37 | 38 |
| A | 0 | 0 | 0 | 0 | 0 | 0 | 0 | 100 |
| C | 0 | 0 | 0 | 0 | 0 | 0 | 0 | 0 |
| D | 0 | 0 | 0 | 0 | 100 | 90 | 0 | 0 |
| E | 0 | 0 | 0 | 0 | 0 | 0 | 0 | 0 |
| F | 0 | 100 | 0 | 80 | 0 | 0 | 0 | 0 |
| G | 100 | 0 | 0 | 0 | 0 | 10 | 0 | 0 |
| H | 0 | 0 | 0 | 0 | 0 | 0 | 0 | 0 |
| I | 0 | 0 | 0 | 0 | 0 | 0 | 80 | 0 |
| K | 0 | 0 | 0 | 0 | 0 | 0 | 0 | 0 |
| L | 0 | 0 | 0 | 20 | 0 | 0 | 0 | 0 |
| M | 0 | 0 | 0 | 0 | 0 | 0 | 0 | 0 |
| N | 0 | 0 | 0 | 0 | 0 | 0 | 0 | 0 |
| P | 0 | 0 | 0 | 0 | 0 | 0 | 0 | 0 |
| Q | 0 | 0 | 0 | 0 | 0 | 0 | 0 | 0 |
| R | 0 | 0 | 0 | 0 | 0 | 0 | 0 | 0 |
| S | 0 | 0 | 0 | 0 | 0 | 0 | 0 | 0 |
| T | 0 | 0 | 100 | 0 | 0 | 0 | 0 | 0 |
| V | 0 | 0 | 0 | 0 | 0 | 0 | 0 | 0 |
| W | 0 | 0 | 0 | 0 | 0 | 0 | 0 | 0 |
| Y | 0 | 0 | 0 | 0 | 0 | 0 | 20 | 0 |

TABLE 4-5
CDR2 amino acid frequency distribution
for cluster 37C7 (Group B)

| | Position | | | | | | | |
|---|---|---|---|---|---|---|---|---|
| AA | 56 | 57 | 58 | 59 | 62 | 63 | 64 | 65 |
| A | 0 | 0 | 0 | 0 | 0 | 0 | 0 | 0 |
| C | 0 | 0 | 0 | 0 | 0 | 0 | 0 | 0 |
| D | 0 | 0 | 0 | 0 | 0 | 0 | 0 | 0 |
| E | 0 | 0 | 0 | 0 | 0 | 0 | 0 | 0 |
| F | 0 | 20 | 0 | 0 | 0 | 0 | 0 | 0 |
| G | 0 | 0 | 0 | 0 | 80 | 0 | 0 | 0 |
| H | 0 | 0 | 0 | 0 | 0 | 0 | 0 | 0 |
| I | 100 | 0 | 0 | 0 | 0 | 0 | 0 | 0 |
| K | 0 | 0 | 0 | 0 | 0 | 0 | 0 | 0 |
| L | 0 | 0 | 0 | 0 | 0 | 0 | 0 | 0 |
| M | 0 | 0 | 0 | 0 | 0 | 0 | 0 | 0 |
| N | 0 | 0 | 0 | 0 | 0 | 0 | 100 | 0 |
| P | 0 | 0 | 0 | 0 | 0 | 80 | 0 | 0 |
| Q | 0 | 0 | 0 | 0 | 0 | 0 | 0 | 0 |
| R | 0 | 0 | 0 | 0 | 0 | 0 | 0 | 0 |
| S | 0 | 0 | 100 | 0 | 20 | 20 | 0 | 0 |
| T | 0 | 0 | 0 | 0 | 0 | 0 | 0 | 100 |
| V | 0 | 0 | 0 | 0 | 0 | 0 | 0 | 0 |
| W | 0 | 0 | 0 | 0 | 0 | 0 | 0 | 0 |
| Y | 0 | 80 | 0 | 100 | 0 | 0 | 0 | 0 |

TABLE 4-6
CDR3 amino acid frequency distribution for cluster 37C7 (Group B)

| | Position | | | | | | | | | | | | | | | |
|---|---|---|---|---|---|---|---|---|---|---|---|---|---|---|---|---|
| AA | 105 | 106 | 107 | 108 | 109 | 110 | 111 | 111.1 | 112.2 | 112.1 | 112 | 113 | 114 | 115 | 116 | 117 |
| A | 90 | 100 | 0 | 0 | 0 | 0 | 0 | 0 | 0 | 0 | 0 | 0 | 0 | 0 | 0 | 0 |
| C | 0 | 0 | 0 | 0 | 0 | 0 | 0 | 0 | 0 | 0 | 0 | 0 | 0 | 0 | 0 | 0 |
| D | 0 | 0 | 90 | 0 | 100 | 0 | 0 | 0 | 0 | 0 | 10 | 0 | 0 | 0 | 100 | 0 |
| E | 0 | 0 | 10 | 0 | 0 | 0 | 0 | 0 | 0 | 0 | 0 | 0 | 0 | 0 | 0 | 0 |
| F | 0 | 0 | 0 | 0 | 0 | 0 | 0 | 0 | 0 | 0 | 0 | 0 | 0 | 0 | 0 | 0 |
| G | 0 | 0 | 0 | 0 | 0 | 0 | 0 | 0 | 10 | 10 | 0 | 100 | 0 | 0 | 0 | 0 |
| H | 0 | 0 | 0 | 0 | 0 | 0 | 0 | 0 | 0 | 0 | 0 | 0 | 0 | 100 | 0 | 0 |
| I | 0 | 0 | 0 | 0 | 0 | 0 | 0 | 0 | 0 | 0 | 0 | 0 | 0 | 0 | 0 | 0 |
| K | 0 | 0 | 0 | 0 | 0 | 0 | 0 | 0 | 0 | 0 | 0 | 0 | 0 | 0 | 0 | 0 |
| L | 0 | 0 | 0 | 0 | 0 | 100 | 0 | 0 | 0 | 0 | 0 | 0 | 0 | 0 | 0 | 0 |
| M | 0 | 0 | 0 | 0 | 0 | 0 | 0 | 0 | 0 | 0 | 0 | 0 | 0 | 0 | 0 | 0 |
| N | 0 | 0 | 0 | 0 | 0 | 0 | 0 | 0 | 0 | 0 | 0 | 0 | 0 | 0 | 0 | 0 |
| P | 0 | 0 | 0 | 0 | 0 | 0 | 0 | 0 | 0 | 0 | 0 | 0 | 100 | 0 | 0 | 0 |
| Q | 0 | 0 | 0 | 0 | 0 | 0 | 0 | 0 | 0 | 0 | 0 | 0 | 0 | 0 | 0 | 0 |
| R | 0 | 0 | 0 | 0 | 0 | 0 | 40 | 0 | 0 | 0 | 0 | 0 | 0 | 0 | 0 | 0 |
| S | 0 | 0 | 0 | 100 | 0 | 0 | 60 | 0 | 0 | 0 | 0 | 0 | 0 | 0 | 0 | 10 |
| T | 0 | 0 | 0 | 0 | 0 | 0 | 0 | 100 | 0 | 0 | 0 | 0 | 0 | 0 | 0 | 0 |
| V | 10 | 0 | 0 | 0 | 0 | 0 | 0 | 0 | 90 | 90 | 90 | 0 | 0 | 0 | 0 | 0 |
| W | 0 | 0 | 0 | 0 | 0 | 0 | 0 | 0 | 0 | 0 | 0 | 0 | 0 | 0 | 0 | 0 |
| Y | 0 | 0 | 0 | 0 | 0 | 0 | 0 | 0 | 0 | 0 | 0 | 0 | 0 | 0 | 0 | 90 |

TABLE 4-7
CDR1 amino acid frequency distribution
for cluster 31G11 (Group C)

| | Position | | | | | | | |
|---|---|---|---|---|---|---|---|---|
| AA | 27 | 28 | 29 | 30 | 35 | 36 | 37 | 38 |
| A | 0 | 0 | 0 | 0 | 0 | 0 | 0 | 100 |
| C | 0 | 0 | 0 | 0 | 0 | 0 | 0 | 0 |
| D | 0 | 0 | 0 | 0 | 0 | 0 | 0 | 0 |
| E | 0 | 0 | 0 | 0 | 0 | 0 | 0 | 0 |
| F | 0 | 100 | 0 | 100 | 0 | 0 | 0 | 0 |
| G | 100 | 0 | 0 | 0 | 0 | 45.5 | 0 | 0 |
| H | 0 | 0 | 0 | 0 | 0 | 0 | 0 | 0 |
| I | 0 | 0 | 0 | 0 | 0 | 0 | 0 | 0 |
| K | 0 | 0 | 0 | 0 | 0 | 0 | 0 | 0 |
| L | 0 | 0 | 0 | 0 | 0 | 0 | 0 | 0 |
| M | 0 | 0 | 0 | 0 | 0 | 0 | 0 | 0 |
| N | 0 | 0 | 0 | 0 | 0 | 0 | 0 | 0 |
| P | 0 | 0 | 0 | 0 | 0 | 0 | 0 | 0 |
| Q | 0 | 0 | 0 | 0 | 0 | 0 | 0 | 0 |
| R | 0 | 0 | 0 | 0 | 0 | 18.2 | 0 | 0 |
| S | 0 | 0 | 0 | 0 | 100 | 36.4 | 0 | 0 |
| T | 0 | 0 | 100 | 0 | 0 | 0 | 0 | 0 |
| V | 0 | 0 | 0 | 0 | 0 | 0 | 0 | 0 |
| W | 0 | 0 | 0 | 0 | 0 | 0 | 0 | 0 |
| Y | 0 | 0 | 0 | 0 | 0 | 0 | 100 | 0 |

TABLE 4-8
CDR2 amino acid frequency distribution
for cluster 31G11 (Group C)

| | Position | | | | | | | |
|---|---|---|---|---|---|---|---|---|
| AA | 56 | 57 | 58 | 59 | 62 | 63 | 64 | 65 |
| A | 0 | 0 | 0 | 0 | 0 | 0 | 0 | 0 |
| C | 0 | 0 | 0 | 0 | 0 | 0 | 0 | 0 |
| D | 0 | 0 | 18.2 | 100 | 0 | 0 | 54.6 | 0 |
| E | 0 | 0 | 0 | 0 | 0 | 0 | 45.5 | 0 |
| F | 0 | 0 | 0 | 0 | 0 | 0 | 0 | 0 |
| G | 0 | 0 | 0 | 0 | 100 | 0 | 0 | 0 |
| H | 0 | 0 | 0 | 0 | 0 | 0 | 0 | 0 |
| I | 100 | 0 | 0 | 0 | 0 | 0 | 0 | 0 |
| K | 0 | 0 | 0 | 0 | 0 | 0 | 0 | 0 |
| L | 0 | 0 | 0 | 0 | 0 | 0 | 0 | 0 |
| M | 0 | 0 | 0 | 0 | 0 | 0 | 0 | 0 |
| N | 0 | 0 | 0 | 0 | 0 | 0 | 0 | 0 |
| P | 0 | 0 | 0 | 0 | 0 | 0 | 0 | 0 |
| Q | 0 | 0 | 0 | 0 | 0 | 0 | 0 | 0 |
| R | 0 | 0 | 0 | 0 | 0 | 0 | 0 | 0 |
| S | 0 | 54.6 | 81.8 | 0 | 0 | 100 | 0 | 0 |
| T | 0 | 0 | 0 | 0 | 0 | 0 | 0 | 100 |
| V | 0 | 0 | 0 | 0 | 0 | 0 | 0 | 0 |
| W | 0 | 0 | 0 | 0 | 0 | 0 | 0 | 0 |
| Y | 0 | 45.5 | 0 | 0 | 0 | 0 | 0 | 0 |

TABLE 4-9
CDR3 amino acid frequency distribution for cluster 31G11 (Group C)

| | Position | | | | | | | | | | | | | | | | | |
|---|---|---|---|---|---|---|---|---|---|---|---|---|---|---|---|---|---|---|
| AA | 105 | 106 | 107 | 108 | 109 | 110 | 111 | 111.1 | 111.2 | 112.3 | 112.2 | 112.1 | 112 | 113 | 114 | 115 | 116 | 117 |
| A | 100 | 0 | 9.1 | 100 | 0 | 0 | 0 | 0 | 0 | 0 | 0 | 0 | 0 | 0 | 0 | 0 | 0 | 0 |
| C | 0 | 0 | 0 | 0 | 0 | 0 | 0 | 0 | 0 | 0 | 0 | 0 | 0 | 0 | 0 | 0 | 0 | 0 |
| D | 0 | 0 | 90.9 | 0 | 0 | 0 | 0 | 0 | 0 | 0 | 0 | 0 | 0 | 0 | 45.5 | 0 | 100 | 0 |
| E | 0 | 0 | 0 | 0 | 0 | 0 | 0 | 0 | 0 | 0 | 0 | 0 | 0 | 0 | 54.5 | 0 | 0 | 0 |
| F | 0 | 0 | 0 | 0 | 0 | 0 | 0 | 0 | 0 | 0 | 0 | 100 | 0 | 45.5 | 0 | 0 | 0 | 0 |
| G | 0 | 0 | 0 | 0 | 100 | 18.2 | 0 | 100 | 0 | 100 | 0 | 0 | 100 | 0 | 0 | 0 | 0 | 0 |
| H | 0 | 0 | 0 | 0 | 0 | 0 | 0 | 0 | 0 | 0 | 0 | 0 | 0 | 0 | 0 | 0 | 0 | 0 |
| I | 0 | 0 | 0 | 0 | 0 | 0 | 0 | 0 | 0 | 0 | 0 | 0 | 0 | 0 | 0 | 0 | 0 | 0 |
| K | 0 | 90.9 | 0 | 0 | 0 | 0 | 0 | 0 | 0 | 0 | 0 | 0 | 0 | 0 | 0 | 0 | 0 | 0 |
| L | 0 | 0 | 0 | 0 | 0 | 0 | 0 | 0 | 0 | 0 | 0 | 0 | 0 | 0 | 0 | 0 | 0 | 0 |
| M | 0 | 0 | 0 | 0 | 0 | 0 | 0 | 0 | 0 | 0 | 0 | 0 | 0 | 0 | 0 | 0 | 0 | 0 |
| N | 0 | 9.1 | 0 | 0 | 0 | 0 | 0 | 0 | 0 | 0 | 0 | 0 | 0 | 0 | 0 | 0 | 0 | 0 |
| P | 0 | 0 | 0 | 0 | 0 | 0 | 0 | 0 | 0 | 0 | 100 | 0 | 0 | 0 | 0 | 0 | 0 | 0 |
| Q | 0 | 0 | 0 | 0 | 0 | 0 | 0 | 0 | 0 | 0 | 0 | 0 | 0 | 0 | 0 | 0 | 0 | 0 |
| R | 0 | 0 | 0 | 0 | 0 | 0 | 0 | 0 | 45.5 | 0 | 0 | 0 | 0 | 0 | 0 | 0 | 0 | 0 |
| S | 0 | 0 | 0 | 0 | 0 | 81.8 | 0 | 0 | 0 | 0 | 0 | 0 | 0 | 0 | 0 | 0 | 0 | 0 |
| T | 0 | 0 | 0 | 0 | 0 | 0 | 0 | 0 | 54.5 | 0 | 0 | 0 | 0 | 0 | 0 | 0 | 0 | 0 |
| V | 0 | 0 | 0 | 0 | 0 | 0 | 0 | 0 | 0 | 0 | 0 | 0 | 0 | 0 | 0 | 0 | 0 | 0 |
| W | 0 | 0 | 0 | 0 | 0 | 0 | 100 | 0 | 0 | 0 | 0 | 0 | 0 | 0 | 0 | 0 | 0 | 0 |
| Y | 0 | 0 | 0 | 0 | 0 | 0 | 0 | 0 | 0 | 0 | 0 | 0 | 0 | 54.5 | 0 | 100 | 0 | 100 |

TABLE 4-10
CDR1 amino acid frequency distribution
for cluster 33D4 (Group D)

| | Position | | | | | | | |
|---|---|---|---|---|---|---|---|---|
| AA | 27 | 28 | 29 | 30 | 35 | 36 | 37 | 38 |
| A | 0 | 0 | 0 | 0 | 0 | 0 | 0 | 0 |
| C | 0 | 0 | 0 | 0 | 0 | 0 | 0 | 0 |
| D | 0 | 0 | 0 | 0 | 0 | 97.5 | 0 | 0 |
| E | 0 | 0 | 0 | 0 | 0 | 0 | 0 | 0 |
| F | 0 | 0 | 0 | 100 | 0 | 0 | 0 | 0 |
| G | 100 | 0 | 0 | 0 | 1.3 | 0 | 0 | 97.5 |
| H | 0 | 0 | 0 | 0 | 0 | 0 | 0 | 0 |
| I | 0 | 0 | 0 | 0 | 0 | 0 | 0 | 0 |
| K | 0 | 0 | 0 | 0 | 0 | 0 | 0 | 0 |
| L | 0 | 0 | 0 | 0 | 0 | 0 | 0 | 0 |
| M | 0 | 0 | 0 | 0 | 0 | 0 | 0 | 0 |
| N | 0 | 0 | 0 | 0 | 0 | 1.3 | 0 | 0 |
| P | 0 | 0 | 0 | 0 | 0 | 0 | 0 | 0 |
| Q | 0 | 0 | 0 | 0 | 0 | 0 | 0 | 0 |
| R | 0 | 100 | 0 | 0 | 0 | 0 | 0 | 0 |
| S | 0 | 0 | 0 | 0 | 98.7 | 1.3 | 0 | 0 |
| T | 0 | 0 | 100 | 0 | 0 | 0 | 0 | 1.3 |
| V | 0 | 0 | 0 | 0 | 0 | 0 | 0 | 0 |
| W | 0 | 0 | 0 | 0 | 0 | 0 | 0 | 0 |
| Y | 0 | 0 | 0 | 0 | 0 | 0 | 100 | 1.3 |

TABLE 4-11
CDR2 amino acid frequency distribution
for cluster 33D4 (Group D)

| | Position | | | | | | | |
|---|---|---|---|---|---|---|---|---|
| AA | 56 | 57 | 58 | 59 | 62 | 63 | 64 | 65 |
| A | 0 | 0 | 0 | 0 | 0 | 0 | 0 | 0 |
| C | 0 | 0 | 0 | 0 | 0 | 0 | 0 | 0 |
| D | 0 | 0 | 0 | 0 | 0 | 0 | 0 | 0 |
| E | 0 | 0 | 0 | 0 | 0 | 0 | 0 | 0 |
| F | 0 | 0 | 0 | 0 | 0 | 0 | 0 | 0 |
| G | 0 | 0 | 0 | 0 | 2.5 | 98.7 | 0 | 0 |
| H | 0 | 0 | 0 | 0 | 0 | 0 | 0 | 0 |
| I | 100 | 0 | 0 | 0 | 0 | 0 | 0 | 0 |
| K | 0 | 0 | 0 | 0 | 0 | 1.3 | 0 | 0 |
| L | 0 | 0 | 0 | 0 | 0 | 0 | 0 | 0 |
| M | 0 | 0 | 0 | 0 | 0 | 0 | 0 | 0 |
| N | 0 | 96 | 0 | 0 | 96.2 | 0 | 0 | 0 |
| P | 0 | 0 | 0 | 0 | 0 | 0 | 0 | 0 |
| Q | 0 | 1.3 | 0 | 0 | 0 | 0 | 0 | 0 |
| R | 0 | 1.3 | 0 | 0 | 0 | 0 | 97.5 | 0 |
| S | 0 | 1.3 | 0 | 99 | 0 | 0 | 2.5 | 0 |
| T | 0 | 0 | 0 | 1.3 | 1.3 | 0 | 0 | 100 |
| V | 0 | 0 | 0 | 0 | 0 | 0 | 0 | 0 |
| W | 0 | 0 | 100 | 0 | 0 | 0 | 0 | 0 |
| Y | 0 | 0 | 0 | 0 | 0 | 0 | 0 | 0 |

TABLE 4-12
CDR3 amino acid frequency distribution for cluster 33D4 (Group D)

| | Position | | | | | | | | | | |
|---|---|---|---|---|---|---|---|---|---|---|---|
| AA | 105 | 106 | 107 | 108 | 109 | 110 | 113 | 114 | 115 | 116 | 117 |
| A | 97.5 | 84.8 | 1.3 | 1.3 | 2.5 | 1.3 | 0 | 88.6 | 0 | 1.3 | 0 |
| C | 0 | 0 | 0 | 0 | 0 | 0 | 0 | 0 | 0 | 0 | 0 |
| D | 0 | 0 | 0 | 0 | 0 | 0 | 0 | 0 | 1.3 | 0 | 0 |
| E | 0 | 0 | 0 | 0 | 0 | 0 | 3.8 | 3.8 | 0 | 0 | 0 |
| F | 0 | 0 | 0 | 0 | 3.8 | 0 | 0 | 0 | 3.8 | 0 | 0 |
| G | 0 | 11.4 | 0 | 0 | 0 | 96.2 | 0 | 1.3 | 0 | 0 | 0 |
| H | 0 | 0 | 0 | 1.3 | 0 | 0 | 0 | 0 | 1.3 | 0 | 1.3 |
| I | 0 | 0 | 1.3 | 0 | 0 | 0 | 0 | 0 | 0 | 0 | 0 |
| K | 0 | 0 | 0 | 0 | 0 | 0 | 78.5 | 0 | 0 | 0 | 0 |
| L | 0 | 0 | 0 | 2.5 | 0 | 0 | 0 | 0 | 0 | 0 | 0 |
| M | 0 | 0 | 0 | 0 | 0 | 0 | 1.3 | 0 | 0 | 0 | 0 |
| N | 0 | 0 | 1.3 | 0 | 0 | 0 | 1.3 | 0 | 1.3 | 0 | 3.8 |
| P | 0 | 0 | 5.1 | 91.1 | 1.3 | 0 | 0 | 1.3 | 0 | 0 | 0 |
| Q | 0 | 0 | 0 | 0 | 0 | 0 | 6.3 | 0 | 0 | 0 | 0 |
| R | 0 | 0 | 0 | 1.3 | 0 | 1.3 | 5.1 | 0 | 0 | 0 | 0 |
| S | 0 | 0 | 1.3 | 1.3 | 86.1 | 0 | 0 | 1.3 | 0 | 19 | 1.3 |
| T | 1.3 | 2.5 | 89.9 | 1.3 | 5.1 | 0 | 3.8 | 2.5 | 0 | 79.7 | 0 |
| V | 1.3 | 1.3 | 0 | 0 | 0 | 1.3 | 0 | 1.3 | 0 | 0 | 0 |
| W | 0 | 0 | 0 | 0 | 0 | 0 | 0 | 0 | 0 | 0 | 0 |
| Y | 0 | 0 | 0 | 0 | 1.3 | 0 | 0 | 0 | 92.4 | 0 | 93.7 |

TABLE 4-13
CDR1 amino acid frequency distribution
for cluster N1277 (Group G)

| | Position | | | | | | | |
|---|---|---|---|---|---|---|---|---|
| AA | 27 | 28 | 29 | 30 | 35 | 36 | 37 | 38 |
| A | 0 | 0 | 0 | 0 | 0 | 0 | 0 | 100 |
| C | 0 | 0 | 0 | 0 | 0 | 0 | 0 | 0 |
| D | 0 | 0 | 0 | 0 | 100 | 0 | 0 | 0 |
| E | 0 | 0 | 0 | 0 | 0 | 0 | 0 | 0 |
| F | 0 | 66.7 | 0 | 0 | 0 | 0 | 0 | 0 |
| G | 100 | 0 | 0 | 0 | 0 | 0 | 0 | 0 |
| H | 0 | 0 | 0 | 0 | 0 | 0 | 0 | 0 |
| I | 0 | 0 | 0 | 0 | 0 | 0 | 0 | 0 |
| K | 0 | 0 | 0 | 0 | 0 | 0 | 0 | 0 |
| L | 0 | 33.3 | 0 | 100 | 0 | 0 | 0 | 0 |
| M | 0 | 0 | 0 | 0 | 0 | 0 | 0 | 0 |
| N | 0 | 0 | 0 | 0 | 0 | 0 | 0 | 0 |
| P | 0 | 0 | 0 | 0 | 0 | 0 | 0 | 0 |
| Q | 0 | 0 | 0 | 0 | 0 | 0 | 0 | 0 |
| R | 0 | 0 | 0 | 0 | 0 | 0 | 0 | 0 |
| S | 0 | 0 | 0 | 0 | 0 | 0 | 0 | 0 |
| T | 0 | 0 | 100 | 0 | 0 | 0 | 0 | 0 |
| V | 0 | 0 | 0 | 0 | 0 | 0 | 0 | 0 |
| W | 0 | 0 | 0 | 0 | 0 | 0 | 0 | 0 |
| Y | 0 | 0 | 0 | 0 | 0 | 100 | 100 | 0 |

TABLE 4-14
CDR2 amino acid frequency distribution
for cluster N1277 (Group G)

| | Position | | | | | | | |
|---|---|---|---|---|---|---|---|---|
| AA | 56 | 57 | 58 | 59 | 62 | 63 | 64 | 65 |
| A | 0 | 0 | 0 | 0 | 0 | 0 | 0 | 0 |
| C | 0 | 0 | 0 | 0 | 0 | 0 | 0 | 0 |
| D | 0 | 0 | 0 | 0 | 100 | 0 | 0 | 0 |
| E | 0 | 0 | 0 | 0 | 0 | 0 | 0 | 0 |
| F | 0 | 0 | 0 | 0 | 0 | 0 | 0 | 0 |
| G | 0 | 0 | 0 | 33.3 | 0 | 100 | 0 | 0 |
| H | 0 | 0 | 0 | 0 | 0 | 0 | 0 | 0 |
| I | 100 | 0 | 0 | 0 | 0 | 0 | 0 | 0 |
| K | 0 | 0 | 0 | 0 | 0 | 0 | 0 | 0 |
| L | 0 | 0 | 0 | 0 | 0 | 0 | 0 | 0 |
| M | 0 | 0 | 0 | 0 | 0 | 0 | 0 | 0 |
| N | 0 | 33.3 | 0 | 0 | 0 | 0 | 0 | 0 |
| P | 0 | 0 | 0 | 0 | 0 | 0 | 0 | 0 |
| Q | 0 | 0 | 0 | 0 | 0 | 0 | 0 | 0 |
| R | 0 | 0 | 0 | 0 | 0 | 0 | 0 | 0 |
| S | 0 | 66.7 | 0 | 66.7 | 0 | 0 | 100 | 0 |
| T | 0 | 0 | 66.7 | 0 | 0 | 0 | 0 | 100 |
| V | 0 | 0 | 33.3 | 0 | 0 | 0 | 0 | 0 |
| W | 0 | 0 | 0 | 0 | 0 | 0 | 0 | 0 |
| Y | 0 | 0 | 0 | 0 | 0 | 0 | 0 | 0 |

TABLE 4-15
CDR3 amino acid frequency distribution for cluster N1277 (Group G)

| | Position | | | | | | | | | | |
|---|---|---|---|---|---|---|---|---|---|---|---|
| AA | 105 | 106 | 107 | 108 | 109 | 110 | 111 | 111.1 | 111.2 | 111.3 | 111.4 |
| A | 100 | 0 | 0 | 0 | 0 | 0 | 0 | 0 | 0 | 100 | 0 |
| C | 0 | 0 | 0 | 0 | 0 | 0 | 0 | 0 | 100 | 0 | 0 |
| D | 0 | 0 | 0 | 0 | 0 | 0 | 0 | 0 | 0 | 0 | 0 |
| E | 0 | 0 | 0 | 0 | 0 | 0 | 0 | 0 | 0 | 0 | 0 |
| F | 0 | 0 | 0 | 0 | 0 | 0 | 0 | 0 | 0 | 0 | 0 |
| G | 0 | 0 | 0 | 100 | 0 | 0 | 0 | 0 | 0 | 0 | 0 |
| H | 0 | 0 | 0 | 0 | 0 | 0 | 0 | 0 | 0 | 0 | 0 |
| I | 0 | 0 | 0 | 0 | 0 | 0 | 0 | 0 | 0 | 0 | 0 |
| K | 0 | 0 | 0 | 0 | 0 | 0 | 0 | 0 | 0 | 0 | 0 |
| L | 0 | 0 | 0 | 0 | 0 | 0 | 0 | 0 | 0 | 0 | 0 |
| M | 0 | 0 | 0 | 0 | 0 | 0 | 33.3 | 0 | 0 | 0 | 0 |
| N | 0 | 0 | 0 | 0 | 0 | 0 | 0 | 0 | 0 | 0 | 0 |
| P | 0 | 0 | 100 | 0 | 100 | 0 | 0 | 0 | 0 | 0 | 100 |
| Q | 0 | 0 | 0 | 0 | 0 | 0 | 0 | 0 | 0 | 0 | 0 |
| R | 0 | 0 | 0 | 0 | 0 | 0 | 0 | 0 | 0 | 0 | 0 |
| S | 0 | 0 | 0 | 0 | 0 | 0 | 33.3 | 0 | 0 | 0 | 0 |
| T | 0 | 100 | 0 | 0 | 0 | 0 | 33.3 | 0 | 0 | 0 | 0 |
| V | 0 | 0 | 0 | 0 | 0 | 0 | 0 | 0 | 0 | 0 | 0 |
| W | 0 | 0 | 0 | 0 | 0 | 0 | 0 | 0 | 0 | 0 | 0 |
| Y | 0 | 0 | 0 | 0 | 0 | 100 | 0 | 100 | 0 | 0 | 0 |

| | Position | | | | | | | | | | |
|---|---|---|---|---|---|---|---|---|---|---|---|
| AA | 112.5 | 112.4 | 112.3 | 112.2 | 112.1 | 112 | 113 | 114 | 115 | 116 | 117 |
| A | 0 | 0 | 0 | 0 | 0 | 0 | 0 | 0 | 0 | 0 | 0 |
| C | 0 | 0 | 0 | 0 | 0 | 0 | 0 | 0 | 0 | 0 | 0 |
| D | 0 | 0 | 0 | 0 | 0 | 0 | 0 | 0 | 0 | 100 | 0 |
| E | 0 | 0 | 0 | 0 | 0 | 0 | 0 | 0 | 0 | 0 | 0 |
| F | 0 | 0 | 0 | 0 | 0 | 0 | 0 | 0 | 0 | 0 | 0 |
| G | 0 | 100 | 0 | 0 | 0 | 0 | 0 | 100 | 0 | 0 | 0 |
| H | 0 | 0 | 0 | 0 | 0 | 0 | 0 | 0 | 0 | 0 | 0 |
| I | 0 | 0 | 0 | 0 | 0 | 0 | 0 | 0 | 0 | 0 | 0 |
| K | 0 | 0 | 0 | 0 | 0 | 0 | 0 | 0 | 0 | 0 | 0 |
| L | 0 | 0 | 0 | 0 | 0 | 0 | 0 | 0 | 0 | 0 | 0 |
| M | 0 | 0 | 0 | 0 | 0 | 0 | 0 | 0 | 0 | 0 | 0 |
| N | 0 | 0 | 0 | 0 | 0 | 0 | 0 | 0 | 0 | 0 | 0 |
| P | 0 | 0 | 0 | 0 | 0 | 0 | 0 | 0 | 0 | 0 | 0 |
| Q | 0 | 0 | 0 | 0 | 0 | 0 | 0 | 0 | 0 | 0 | 0 |
| R | 0 | 0 | 0 | 0 | 0 | 0 | 100 | 0 | 0 | 0 | 0 |
| S | 0 | 0 | 100 | 100 | 0 | 100 | 0 | 0 | 0 | 0 | 0 |
| T | 0 | 0 | 0 | 0 | 0 | 0 | 0 | 0 | 0 | 0 | 0 |
| V | 0 | 0 | 0 | 0 | 0 | 0 | 0 | 0 | 0 | 0 | 0 |
| W | 0 | 0 | 0 | 0 | 100 | 0 | 0 | 0 | 0 | 0 | 0 |
| Y | 100 | 0 | 0 | 0 | 0 | 0 | 0 | 0 | 100 | 0 | 100 |

TABLE 4-16
CDR1 amino acid frequency distribution
for cluster N1364-N1365 (Group J)

| | Position | | | | | | | |
|---|---|---|---|---|---|---|---|---|
| AA | 27 | 28 | 29 | 30 | 35 | 36 | 37 | 38 |
| A | 0 | 0 | 0 | 0 | 0 | 0 | 0 | 2 |
| C | 0 | 0 | 0 | 0 | 0 | 0 | 0 | 0 |
| D | 0 | 0 | 0 | 0 | 2 | 2 | 0 | 0 |
| E | 0 | 0 | 0 | 0 | 0 | 0 | 0 | 0 |
| F | 0 | 100 | 0 | 100 | 0 | 0 | 0 | 0 |
| G | 100 | 0 | 0 | 0 | 0 | 0 | 0 | 0 |
| H | 0 | 0 | 0 | 0 | 0 | 0 | 0 | 0 |
| I | 0 | 0 | 0 | 0 | 0 | 0 | 2 | 0 |
| K | 0 | 0 | 0 | 0 | 0 | 2 | 0 | 0 |
| L | 0 | 0 | 0 | 0 | 0 | 0 | 0 | 0 |
| M | 0 | 0 | 0 | 0 | 0 | 96 | 0 | 0 |
| N | 0 | 0 | 72 | 0 | 0 | 0 | 0 | 0 |
| P | 0 | 0 | 0 | 0 | 0 | 0 | 0 | 0 |
| Q | 0 | 0 | 0 | 0 | 0 | 0 | 0 | 0 |
| R | 0 | 0 | 0 | 0 | 0 | 0 | 0 | 0 |
| S | 0 | 0 | 0 | 0 | 98 | 0 | 0 | 98 |
| T | 0 | 0 | 28 | 0 | 0 | 0 | 0 | 0 |
| V | 0 | 0 | 0 | 0 | 0 | 0 | 0 | 0 |
| W | 0 | 0 | 0 | 0 | 0 | 0 | 0 | 0 |
| Y | 0 | 0 | 0 | 0 | 0 | 0 | 98 | 0 |

TABLE 4-17
CDR2 amino acid frequency distribution
for cluster N1364-N1365 (Group J)

Position

| AA | 56 | 57 | 58 | 59 | 62 | 63 | 64 | 65 |
|---|---|---|---|---|---|---|---|---|
| A | 0 | 0 | 0 | 0 | 0 | 0 | 0 | 0 |
| C | 0 | 0 | 0 | 0 | 0 | 0 | 0 | 0 |
| D | 0 | 98 | 0 | 0 | 0 | 2 | 0 | 0 |
| E | 0 | 0 | 0 | 0 | 0 | 0 | 0 | 0 |
| F | 0 | 0 | 0 | 0 | 0 | 0 | 0 | 0 |
| G | 0 | 0 | 0 | 84 | 2 | 96 | 0 | 0 |
| H | 0 | 0 | 0 | 0 | 0 | 0 | 0 | 0 |
| I | 100 | 0 | 0 | 0 | 0 | 0 | 0 | 0 |
| K | 0 | 0 | 0 | 0 | 0 | 0 | 0 | 0 |
| L | 0 | 0 | 0 | 0 | 0 | 0 | 0 | 0 |
| M | 0 | 0 | 0 | 0 | 0 | 0 | 0 | 0 |
| N | 0 | 0 | 0 | 0 | 0 | 0 | 4 | 0 |
| P | 0 | 0 | 0 | 0 | 0 | 2 | 0 | 0 |
| Q | 0 | 0 | 0 | 0 | 0 | 0 | 0 | 0 |
| R | 0 | 0 | 0 | 12 | 0 | 0 | 0 | 0 |
| S | 0 | 0 | 2 | 0 | 0 | 0 | 96 | 0 |
| T | 0 | 0 | 98 | 0 | 0 | 0 | 0 | 100 |
| V | 0 | 0 | 0 | 2 | 0 | 0 | 0 | 0 |
| W | 0 | 0 | 0 | 0 | 0 | 0 | 0 | 0 |
| Y | 0 | 2 | 0 | 2 | 0 | 0 | 0 | 0 |

TABLE 4-18
CDR3 amino acid frequency distribution for cluster N1364-N1365 (Group J)

| | Position | | | | | | | | | | | |
|---|---|---|---|---|---|---|---|---|---|---|---|---|
| AA | 105 | 106 | 107 | 108 | 109 | 110 | 112 | 113 | 114 | 115 | 116 | 117 |
| A | 100 | 0 | 0 | 0 | 0 | 18 | 0 | 0 | 2 | 0 | 2 | 0 |
| C | 0 | 0 | 0 | 0 | 0 | 0 | 0 | 0 | 0 | 0 | 0 | 0 |
| D | 0 | 0 | 0 | 0 | 2 | 0 | 0 | 2 | 16 | 0 | 0 | 0 |
| E | 0 | 0 | 0 | 0 | 0 | 0 | 0 | 0 | 70 | 0 | 0 | 0 |
| F | 0 | 0 | 0 | 0 | 0 | 0 | 0 | 2 | 0 | 0 | 0 | 0 |
| G | 0 | 0 | 0 | 16 | 96 | 0 | 0 | 0 | 8 | 0 | 66 | 0 |
| H | 0 | 0 | 0 | 0 | 0 | 0 | 0 | 2 | 0 | 0 | 0 | 0 |
| I | 0 | 0 | 0 | 0 | 0 | 0 | 0 | 0 | 0 | 0 | 0 | 0 |
| K | 0 | 0 | 0 | 0 | 0 | 2 | 0 | 0 | 2 | 0 | 0 | 0 |
| L | 0 | 0 | 0 | 2 | 0 | 0 | 0 | 0 | 0 | 0 | 0 | 0 |
| M | 0 | 0 | 0 | 0 | 0 | 0 | 0 | 0 | 0 | 0 | 0 | 0 |
| N | 0 | 0 | 0 | 0 | 0 | 0 | 0 | 2 | 0 | 0 | 32 | 0 |
| P | 0 | 0 | 0 | 0 | 0 | 2 | 94 | 0 | 0 | 0 | 0 | 0 |
| Q | 0 | 0 | 0 | 2 | 0 | 0 | 2 | 0 | 0 | 0 | 0 | 0 |
| R | 0 | 100 | 0 | 78 | 0 | 0 | 2 | 0 | 0 | 0 | 0 | 0 |
| S | 0 | 0 | 0 | 0 | 0 | 16 | 0 | 2 | 0 | 0 | 0 | 0 |
| T | 0 | 0 | 0 | 0 | 0 | 62 | 2 | 0 | 0 | 0 | 0 | 0 |
| V | 0 | 0 | 100 | 0 | 2 | 0 | 0 | 0 | 2 | 0 | 0 | 0 |
| W | 0 | 0 | 0 | 2 | 0 | 0 | 0 | 0 | 0 | 0 | 0 | 0 |
| Y | 0 | 0 | 0 | 0 | 0 | 0 | 0 | 90 | 0 | 100 | 0 | 100 |

TABLE 4-19
CDR1 amino acid frequency distribution
for cluster 35A10-N1402-N1400 (Group K)

| | Position | | | | | | | |
|---|---|---|---|---|---|---|---|---|
| AA | 27 | 28 | 29 | 30 | 35 | 36 | 37 | 38 |
| A | 0 | 0 | 0 | 0 | 0 | 0 | 0 | 0 |
| C | 0 | 0 | 0 | 0 | 0 | 0 | 0 | 0 |
| D | 0 | 0 | 0 | 0 | 0 | 0 | 5.9 | 0 |
| E | 5.9 | 0 | 0 | 0 | 5.9 | 0 | 0 | 0 |
| F | 0 | 0 | 0 | 98.0 | 0 | 0 | 0 | 7.8 |
| G | 94.1 | 0 | 0 | 0 | 56.9 | 0 | 0 | 0 |
| H | 0 | 9.8 | 0 | 0 | 0 | 0 | 2.0 | 0 |
| I | 0 | 0 | 0 | 0 | 0 | 0 | 0 | 0 |
| K | 0 | 0 | 0 | 0 | 0 | 0 | 0 | 0 |
| L | 0 | 0 | 0 | 2.0 | 0 | 0 | 2.0 | 0 |
| M | 0 | 0 | 0 | 0 | 0 | 0 | 0 | 0 |
| N | 0 | 0 | 0 | 0 | 0 | 70.6 | 0 | 0 |
| P | 0 | 0 | 0 | 0 | 0 | 0 | 0 | 0 |
| Q | 0 | 0 | 0 | 0 | 0 | 0 | 0 | 0 |
| R | 0 | 90.2 | 0 | 0 | 27.5 | 0 | 0 | 0 |
| S | 0 | 0 | 0 | 0 | 9.8 | 29.4 | 0 | 0 |
| T | 0 | 0 | 100 | 0 | 0 | 0 | 0 | 92.2 |
| V | 0 | 0 | 0 | 0 | 0 | 0 | 0 | 0 |
| W | 0 | 0 | 0 | 0 | 0 | 0 | 0 | 0 |
| Y | 0 | 0 | 0 | 0 | 0 | 0 | 90.2 | 0 |

TABLE 4-20
CDR2 amino acid frequency distribution
for cluster 35A10-N1402-N1400 (Group K)

| | Position | | | | | | | |
|---|---|---|---|---|---|---|---|---|
| AA | 56 | 57 | 58 | 59 | 62 | 63 | 64 | 65 |
| A | 0 | 0 | 0 | 2.0 | 0 | 0 | 0 | 0 |
| C | 0 | 0 | 0 | 0 | 0 | 0 | 0 | 0 |
| D | 0 | 0 | 0 | 0 | 0 | 0 | 0 | 0 |
| E | 0 | 0 | 0 | 0 | 0 | 0 | 0 | 0 |
| F | 0 | 0 | 0 | 0 | 0 | 0 | 0 | 0 |
| G | 0 | 0 | 0 | 0 | 98.0 | 88.2 | 0 | 0 |
| H | 0 | 0 | 0 | 0 | 0 | 0 | 0 | 0 |
| I | 100 | 0 | 0 | 0 | 0 | 0 | 7.8 | 0 |
| K | 0 | 2.0 | 0 | 0 | 0 | 0 | 0 | 0 |
| L | 0 | 0 | 0 | 0 | 0 | 9.8 | 0 | 0 |
| M | 0 | 0 | 0 | 0 | 0 | 0 | 0 | 0 |
| N | 0 | 0 | 0 | 0 | 0 | 0 | 0 | 0 |
| P | 0 | 0 | 0 | 13.7 | 0 | 0 | 0 | 0 |
| Q | 0 | 0 | 0 | 0 | 0 | 0 | 0 | 0 |
| R | 0 | 98.0 | 3.9 | 0 | 0 | 2.0 | 0 | 0 |
| S | 0 | 0 | 0 | 0 | 0 | 0 | 90.2 | 0 |
| T | 0 | 0 | 0 | 84.3 | 2.0 | 0 | 2.0 | 100 |
| V | 0 | 0 | 0 | 0 | 0 | 0 | 0 | 0 |
| W | 0 | 0 | 88.2 | 0 | 0 | 0 | 0 | 0 |
| Y | 0 | 0 | 7.8 | 0 | 0 | 0 | 0 | 0 |

TABLE 4-21
CDR3 amino acid frequency distribution
for cluster 35A10-N1402-N1400 (Group K)

| | Position | | | | | | | | | | |
|---|---|---|---|---|---|---|---|---|---|---|---|
| AA | 105 | 106 | 107 | 108 | 109 | 110 | 113 | 114 | 115 | 116 | 117 |
| A | 21.6 | 100 | 88.2 | 0 | 9.8 | 0 | 0 | 96.1 | 0 | 23.5 | 0 |
| C | 0 | 0 | 0 | 0 | 0 | 0 | 0 | 0 | 0 | 0 | 0 |
| D | 0 | 0 | 0 | 0 | 0 | 0 | 0 | 0 | 0 | 2.0 | 0 |
| E | 0 | 0 | 0 | 0 | 0 | 0 | 0 | 2.0 | 0 | 0 | 0 |
| F | 0 | 0 | 0 | 0 | 0 | 0 | 0 | 0 | 96.1 | 0 | 0 |
| G | 0 | 0 | 0 | 0 | 0 | 86.3 | 0 | 0 | 0 | 0 | 0 |
| H | 0 | 0 | 0 | 2.0 | 0 | 0 | 0 | 0 | 0 | 0 | 2.0 |
| I | 0 | 0 | 0 | 0 | 2.0 | 0 | 0 | 0 | 0 | 0 | 2.0 |
| K | 0 | 0 | 0 | 0 | 0 | 0 | 5.9 | 0 | 0 | 0 | 0 |
| L | 0 | 0 | 0 | 2.0 | 0 | 0 | 0 | 0 | 2.0 | 0 | 0 |
| M | 0 | 0 | 0 | 0 | 0 | 0 | 0 | 0 | 0 | 0 | 0 |
| N | 0 | 0 | 0 | 0 | 0 | 0 | 0 | 0 | 0 | 7.8 | 0 |
| P | 0 | 0 | 0 | 90.2 | 3.9 | 0 | 0 | 0 | 0 | 0 | 0 |
| Q | 0 | 0 | 0 | 0 | 0 | 0 | 3.9 | 0 | 0 | 0 | 0 |
| R | 0 | 0 | 0 | 0 | 0 | 5.9 | 88.2 | 0 | 0 | 0 | 0 |
| S | 0 | 0 | 9.8 | 3.9 | 3.9 | 0 | 2.0 | 2.0 | 0 | 0 | 0 |
| T | 31.4 | 0 | 2.0 | 2.0 | 80.4 | 0 | 0 | 0 | 0 | 66.7 | 0 |
| V | 47.1 | 0 | 0 | 0 | 0 | 5.9 | 0 | 0 | 0 | 0 | 0 |
| W | 0 | 0 | 0 | 0 | 0 | 2.0 | 0 | 0 | 0 | 0 | 0 |
| Y | 0 | 0 | 0 | 0 | 0 | 0 | 0 | 0 | 2.0 | 0 | 96.1 |

TABLE 4-22
CDR1 amino acid frequency distribution
for cluster N1425 (Group L)

| | Position | | | | | | | |
|---|---|---|---|---|---|---|---|---|
| AA | 27 | 28 | 29 | 30 | 35 | 36 | 37 | 38 |
| A | 0 | 100 | 0 | 0 | 0 | 0 | 0 | 100 |
| C | 0 | 0 | 0 | 0 | 0 | 0 | 0 | 0 |
| D | 0 | 0 | 0 | 0 | 0 | 0 | 0 | 0 |
| E | 0 | 0 | 0 | 0 | 0 | 0 | 0 | 0 |
| F | 0 | 0 | 0 | 0 | 0 | 0 | 0 | 0 |
| G | 100 | 0 | 0 | 0 | 0 | 0 | 0 | 0 |
| H | 0 | 0 | 0 | 0 | 0 | 0 | 0 | 0 |
| I | 0 | 0 | 0 | 0 | 0 | 0 | 0 | 0 |
| K | 0 | 0 | 0 | 0 | 0 | 0 | 0 | 0 |
| L | 0 | 0 | 0 | 100 | 0 | 0 | 0 | 0 |
| M | 0 | 0 | 0 | 0 | 0 | 0 | 0 | 0 |
| N | 0 | 0 | 0 | 0 | 0 | 0 | 100 | 0 |
| P | 0 | 0 | 0 | 0 | 0 | 0 | 0 | 0 |
| Q | 0 | 0 | 0 | 0 | 0 | 0 | 0 | 0 |
| R | 0 | 0 | 0 | 0 | 0 | 100 | 0 | 0 |
| S | 0 | 0 | 100 | 0 | 100 | 0 | 0 | 0 |
| T | 0 | 0 | 0 | 0 | 0 | 0 | 0 | 0 |
| V | 0 | 0 | 0 | 0 | 0 | 0 | 0 | 0 |
| W | 0 | 0 | 0 | 0 | 0 | 0 | 0 | 0 |
| Y | 0 | 0 | 0 | 0 | 0 | 0 | 0 | 0 |

TABLE 4-23
CDR2 amino acid frequency distribution
for cluster N1425 (Group L)

| | Position | | | | | | |
|---|---|---|---|---|---|---|---|
| AA | 56 | 57 | 58 | 59 | 63 | 64 | 65 |
| A | 0 | 0 | 0 | 0 | 0 | 0 | 0 |
| C | 0 | 0 | 0 | 0 | 0 | 0 | 0 |
| D | 0 | 0 | 100 | 100 | 0 | 0 | 0 |
| E | 0 | 0 | 0 | 0 | 0 | 100 | 0 |
| F | 0 | 0 | 0 | 0 | 0 | 0 | 0 |
| G | 0 | 0 | 0 | 0 | 100 | 0 | 0 |
| H | 0 | 0 | 0 | 0 | 0 | 0 | 0 |
| I | 100 | 0 | 0 | 0 | 0 | 0 | 0 |
| K | 0 | 0 | 0 | 0 | 0 | 0 | 0 |
| L | 0 | 0 | 0 | 0 | 0 | 0 | 0 |
| M | 0 | 0 | 0 | 0 | 0 | 0 | 0 |
| N | 0 | 0 | 0 | 0 | 0 | 0 | 0 |
| P | 0 | 0 | 0 | 0 | 0 | 0 | 0 |
| Q | 0 | 0 | 0 | 0 | 0 | 0 | 0 |
| R | 0 | 0 | 0 | 0 | 0 | 0 | 0 |
| S | 0 | 0 | 0 | 0 | 0 | 0 | 0 |
| T | 0 | 0 | 0 | 0 | 0 | 0 | 100 |
| V | 0 | 0 | 0 | 0 | 0 | 0 | 0 |
| W | 0 | 0 | 0 | 0 | 0 | 0 | 0 |
| Y | 0 | 100 | 0 | 0 | 0 | 0 | 0 |

TABLE 4-24
CDR3 amino acid frequency distribution
for cluster N1425 (Group L)

| | Position | | | | | | |
|---|---|---|---|---|---|---|---|
| AA | 105 | 106 | 107 | 108 | 115 | 116 | 117 |
| A | 100 | 0 | 0 | 100 | 0 | 0 | 0 |
| C | 0 | 0 | 0 | 0 | 0 | 0 | 0 |
| D | 0 | 0 | 0 | 0 | 0 | 100 | 0 |
| E | 0 | 0 | 0 | 0 | 0 | 0 | 0 |
| F | 0 | 0 | 0 | 0 | 100 | 0 | 100 |
| G | 0 | 100 | 0 | 0 | 0 | 0 | 0 |
| H | 0 | 0 | 0 | 0 | 0 | 0 | 0 |
| I | 0 | 0 | 0 | 0 | 0 | 0 | 0 |
| K | 0 | 0 | 0 | 0 | 0 | 0 | 0 |
| L | 0 | 0 | 0 | 0 | 0 | 0 | 0 |
| M | 0 | 0 | 0 | 0 | 0 | 0 | 0 |
| N | 0 | 0 | 0 | 0 | 0 | 0 | 0 |
| P | 0 | 0 | 0 | 0 | 0 | 0 | 0 |
| Q | 0 | 0 | 0 | 0 | 0 | 0 | 0 |
| R | 0 | 0 | 0 | 0 | 0 | 0 | 0 |
| S | 0 | 0 | 100 | 0 | 0 | 0 | 0 |
| T | 0 | 0 | 0 | 0 | 0 | 0 | 0 |
| V | 0 | 0 | 0 | 0 | 0 | 0 | 0 |
| W | 0 | 0 | 0 | 0 | 0 | 0 | 0 |
| Y | 0 | 0 | 0 | 0 | 0 | 0 | 0 |

TABLE 4-25
CDR1 amino acid frequency distribution
for cluster N1409 (Group M)

| | Position | | | | | | | |
|---|---|---|---|---|---|---|---|---|
| AA | 27 | 28 | 29 | 30 | 35 | 36 | 37 | 38 |
| A | 0 | 0 | 0 | 0 | 0 | 0 | 0 | 0 |
| C | 0 | 0 | 0 | 0 | 0 | 0 | 0 | 0 |
| D | 0 | 0 | 0 | 0 | 0 | 0 | 0 | 0 |
| E | 0 | 0 | 0 | 0 | 0 | 0 | 0 | 0 |
| F | 0 | 0 | 0 | 100 | 0 | 100 | 0 | 0 |
| G | 100 | 1.3 | 0 | 0 | 0 | 0 | 0 | 0 |
| H | 0 | 0 | 0 | 0 | 0 | 0 | 0 | 0 |
| I | 0 | 0 | 96 | 0 | 0 | 0 | 0 | 0 |
| K | 0 | 0 | 0 | 0 | 0 | 0 | 0 | 0 |
| L | 0 | 0 | 0 | 0 | 0 | 0 | 0 | 0 |
| M | 0 | 0 | 0 | 0 | 0 | 0 | 0 | 0 |
| N | 0 | 2.6 | 0 | 0 | 0 | 0 | 0 | 0 |
| P | 0 | 0 | 0 | 0 | 0 | 0 | 100 | 100 |
| Q | 0 | 0 | 0 | 0 | 0 | 0 | 0 | 0 |
| R | 0 | 0 | 0 | 0 | 100 | 0 | 0 | 0 |
| S | 0 | 96 | 0 | 0 | 0 | 0 | 0 | 0 |
| T | 0 | 0 | 3.9 | 0 | 0 | 0 | 0 | 0 |
| V | 0 | 0 | 0 | 0 | 0 | 0 | 0 | 0 |
| W | 0 | 0 | 0 | 0 | 0 | 0 | 0 | 0 |
| Y | 0 | 0 | 0 | 0 | 0 | 0 | 0 | 0 |

TABLE 4-26
CDR2 amino acid frequency distribution
for cluster N1409 (Group M)

| | Position | | | | | | |
|---|---|---|---|---|---|---|---|
| AA | 56 | 57 | 58 | 59 | 63 | 64 | 65 |
| A | 0 | 0 | 0 | 0 | 0 | 0 | 1.3 |
| C | 0 | 0 | 0 | 0 | 0 | 0 | 0 |
| D | 0 | 0 | 0 | 0 | 0 | 0 | 0 |
| E | 0 | 0 | 0 | 0 | 0 | 0 | 0 |
| F | 0 | 0 | 0 | 0 | 0 | 0 | 0 |
| G | 0 | 0 | 0 | 100 | 100 | 0 | 0 |
| H | 0 | 0 | 0 | 0 | 0 | 0 | 0 |
| I | 0 | 0 | 0 | 0 | 0 | 0 | 0 |
| K | 0 | 0 | 0 | 0 | 0 | 0 | 0 |
| L | 100 | 0 | 0 | 0 | 0 | 0 | 0 |
| M | 0 | 0 | 0 | 0 | 0 | 0 | 0 |
| N | 0 | 0 | 0 | 0 | 0 | 0 | 0 |
| P | 0 | 0 | 0 | 0 | 0 | 0 | 0 |
| Q | 0 | 0 | 0 | 0 | 0 | 0 | 0 |
| R | 0 | 0 | 0 | 0 | 0 | 0 | 0 |
| S | 0 | 0 | 100 | 0 | 0 | 100 | 0 |
| T | 0 | 100 | 0 | 0 | 0 | 0 | 99 |
| V | 0 | 0 | 0 | 0 | 0 | 0 | 0 |
| W | 0 | 0 | 0 | 0 | 0 | 0 | 0 |
| Y | 0 | 0 | 0 | 0 | 0 | 0 | 0 |

TABLE 4-27
CDR3 amino acid frequency distribution for cluster N1409 (Group M)

| | Position | | | | | | | | | |
|---|---|---|---|---|---|---|---|---|---|---|
| AA | 105 | 106 | 107 | 108 | 109 | 113 | 114 | 115 | 116 | 117 |
| A | 2.6 | 1.3 | 0 | 0 | 0 | 0 | 0 | 0 | 1.3 | 0 |
| C | 0 | 0 | 0 | 0 | 0 | 0 | 0 | 0 | 0 | 0 |
| D | 0 | 0 | 0 | 0 | 0 | 96 | 0 | 0 | 0 | 5.1 |
| E | 0 | 1.3 | 0 | 0 | 0 | 1.3 | 0 | 0 | 0 | 0 |
| F | 1.3 | 0 | 0 | 0 | 0 | 0 | 0 | 0 | 0 | 0 |
| G | 0 | 1.3 | 1.3 | 96 | 3.8 | 0 | 0 | 0 | 0 | 0 |
| H | 0 | 0 | 0 | 0 | 0 | 0 | 0 | 0 | 0 | 1.3 |
| I | 0 | 1.3 | 2.6 | 0 | 1.3 | 0 | 0 | 1.3 | 0 | 0 |
| K | 0 | 0 | 0 | 0 | 0 | 0 | 3.8 | 0 | 1.3 | 0 |
| L | 0 | 2.6 | 64 | 0 | 0 | 0 | 2.6 | 2.6 | 0 | 0 |
| M | 0 | 23 | 0 | 0 | 0 | 0 | 92 | 87 | 0 | 0 |
| N | 0 | 0 | 0 | 0 | 0 | 0 | 0 | 0 | 0 | 0 |
| P | 0 | 0 | 1.3 | 0 | 0 | 0 | 0 | 0 | 1.3 | 0 |
| Q | 0 | 0 | 0 | 0 | 0 | 0 | 0 | 0 | 0 | 0 |
| R | 0 | 1.3 | 1.3 | 1.3 | 90 | 0 | 1.3 | 3.8 | 0 | 0 |
| S | 87 | 0 | 0 | 0 | 5.1 | 0 | 0 | 0 | 1.3 | 1.3 |
| T | 2.6 | 0 | 0 | 0 | 0 | 0 | 0 | 0 | 95 | 0 |
| V | 0 | 68 | 29 | 2.6 | 0 | 1.3 | 0 | 5.1 | 0 | 0 |
| W | 0 | 0 | 0 | 0 | 0 | 0 | 0 | 0 | 0 | 0 |
| Y | 6.4 | 0 | 0 | 0 | 0 | 1.3 | 0 | 0 | 0 | 92 |

TABLE 4-28
CDR1 amino acid frequency distribution
for cluster N1323 (Group N)

| | Position | | | | | | | |
|---|---|---|---|---|---|---|---|---|
| AA | 27 | 28 | 29 | 30 | 35 | 36 | 37 | 38 |
| A | 0 | 0 | 0 | 0 | 0 | 0 | 0 | 100 |
| C | 0 | 0 | 0 | 0 | 0 | 0 | 0 | 0 |
| D | 0 | 0 | 0 | 0 | 100 | 100 | 0 | 0 |
| E | 0 | 0 | 0 | 0 | 0 | 0 | 0 | 0 |
| F | 0 | 100 | 0 | 11.1 | 0 | 0 | 0 | 0 |
| G | 100 | 0 | 0 | 0 | 0 | 0 | 0 | 0 |
| H | 0 | 0 | 0 | 0 | 0 | 0 | 0 | 0 |
| I | 0 | 0 | 0 | 0 | 0 | 0 | 11.1 | 0 |
| K | 0 | 0 | 0 | 0 | 0 | 0 | 0 | 0 |
| L | 0 | 0 | 0 | 88.9 | 0 | 0 | 0 | 0 |
| M | 0 | 0 | 0 | 0 | 0 | 0 | 0 | 0 |
| N | 0 | 0 | 0 | 0 | 0 | 0 | 0 | 0 |
| P | 0 | 0 | 0 | 0 | 0 | 0 | 0 | 0 |
| Q | 0 | 0 | 0 | 0 | 0 | 0 | 0 | 0 |
| R | 0 | 0 | 0 | 0 | 0 | 0 | 0 | 0 |
| S | 0 | 0 | 0 | 0 | 0 | 0 | 0 | 0 |
| T | 0 | 0 | 100 | 0 | 0 | 0 | 0 | 0 |
| V | 0 | 0 | 0 | 0 | 0 | 0 | 0 | 0 |
| W | 0 | 0 | 0 | 0 | 0 | 0 | 0 | 0 |
| Y | 0 | 0 | 0 | 0 | 0 | 0 | 88.9 | 0 |

TABLE 4-29
CDR2 amino acid frequency distribution
for cluster N1323 (Group N)

| | Position | | | | | | | |
|---|---|---|---|---|---|---|---|---|
| AA | 56 | 57 | 58 | 59 | 62 | 63 | 64 | 65 |
| A | 0 | 0 | 0 | 0 | 0 | 0 | 0 | 0 |
| C | 0 | 0 | 0 | 0 | 0 | 0 | 0 | 0 |
| D | 0 | 0 | 0 | 0 | 0 | 0 | 0 | 0 |
| E | 0 | 0 | 0 | 0 | 0 | 0 | 0 | 0 |
| F | 0 | 88.9 | 0 | 0 | 0 | 0 | 0 | 0 |
| G | 0 | 0 | 0 | 0 | 11.1 | 0 | 0 | 0 |
| H | 0 | 0 | 0 | 0 | 0 | 0 | 0 | 0 |
| I | 100 | 0 | 0 | 0 | 0 | 0 | 0 | 0 |
| K | 0 | 0 | 0 | 0 | 0 | 0 | 0 | 0 |
| L | 0 | 0 | 0 | 0 | 0 | 0 | 0 | 0 |
| M | 0 | 0 | 0 | 0 | 0 | 0 | 0 | 0 |
| N | 0 | 0 | 0 | 0 | 0 | 0 | 100 | 0 |
| P | 0 | 0 | 0 | 0 | 0 | 11.1 | 0 | 0 |
| Q | 0 | 0 | 0 | 0 | 0 | 0 | 0 | 0 |
| R | 0 | 0 | 0 | 0 | 0 | 0 | 0 | 0 |
| S | 0 | 0 | 100 | 0 | 88.9 | 77.8 | 0 | 0 |
| T | 0 | 0 | 0 | 0 | 0 | 11.1 | 0 | 100 |
| V | 0 | 0 | 0 | 0 | 0 | 0 | 0 | 0 |
| W | 0 | 0 | 0 | 0 | 0 | 0 | 0 | 0 |
| Y | 0 | 11.1 | 0 | 100 | 0 | 0 | 0 | 0 |

TABLE 4-30
CDR3 amino acid frequency distribution for cluster N1323 (Group N)

| | Position | | | | | | | | | | | | | | |
|---|---|---|---|---|---|---|---|---|---|---|---|---|---|---|---|
| AA | 105 | 106 | 107 | 108 | 109 | 110 | 111 | 111.1 | 112.1 | 112 | 113 | 114 | 115 | 116 | 117 |
| A | 100 | 0 | 0 | 0 | 0 | 0 | 0 | 0 | 0 | 0 | 0 | 0 | 0 | 0 | 0 |
| C | 0 | 0 | 0 | 0 | 0 | 0 | 0 | 0 | 0 | 0 | 0 | 0 | 0 | 0 | 0 |
| D | 0 | 0 | 0 | 100 | 0 | 0 | 0 | 0 | 0 | 0 | 0 | 0 | 0 | 100 | 0 |
| E | 0 | 0 | 0 | 0 | 0 | 100 | 0 | 100 | 0 | 0 | 0 | 11.1 | 0 | 0 | 0 |
| F | 0 | 0 | 0 | 0 | 88.9 | 0 | 0 | 0 | 0 | 0 | 0 | 0 | 0 | 0 | 0 |
| G | 0 | 0 | 100 | 0 | 0 | 0 | 100 | 0 | 0 | 0 | 0 | 0 | 100 | 0 | 0 |
| H | 0 | 0 | 0 | 0 | 0 | 0 | 0 | 0 | 0 | 0 | 0 | 0 | 0 | 0 | 0 |
| I | 0 | 0 | 0 | 0 | 0 | 0 | 0 | 0 | 0 | 0 | 0 | 0 | 0 | 0 | 0 |
| K | 0 | 0 | 0 | 0 | 0 | 0 | 0 | 0 | 0 | 0 | 0 | 88.9 | 0 | 0 | 0 |
| L | 0 | 0 | 0 | 0 | 11.1 | 0 | 0 | 0 | 100 | 0 | 100 | 0 | 0 | 0 | 0 |
| M | 0 | 0 | 0 | 0 | 0 | 0 | 0 | 0 | 0 | 0 | 0 | 0 | 0 | 0 | 0 |
| N | 0 | 0 | 0 | 0 | 0 | 0 | 0 | 0 | 0 | 0 | 0 | 0 | 0 | 0 | 0 |
| P | 0 | 0 | 0 | 0 | 0 | 0 | 0 | 0 | 0 | 0 | 0 | 0 | 0 | 0 | 0 |
| Q | 0 | 0 | 0 | 0 | 0 | 0 | 0 | 0 | 0 | 0 | 0 | 0 | 0 | 0 | 0 |
| R | 0 | 0 | 0 | 0 | 0 | 0 | 0 | 0 | 0 | 0 | 0 | 0 | 0 | 0 | 0 |
| S | 0 | 0 | 0 | 0 | 0 | 0 | 0 | 0 | 0 | 0 | 0 | 0 | 0 | 0 | 0 |
| T | 0 | 0 | 0 | 0 | 0 | 0 | 0 | 0 | 0 | 0 | 0 | 0 | 0 | 0 | 0 |
| V | 0 | 100 | 0 | 0 | 0 | 0 | 0 | 0 | 0 | 100 | 0 | 0 | 0 | 0 | 0 |
| W | 0 | 0 | 0 | 0 | 0 | 0 | 0 | 0 | 0 | 0 | 0 | 0 | 0 | 0 | 0 |
| Y | 0 | 0 | 0 | 0 | 0 | 0 | 0 | 0 | 0 | 0 | 0 | 0 | 0 | 0 | 100 |

TABLE 4-31
CDR1 amino acid frequency distribution
for cluster 33B1 (Group O)

| | Position | | | | | | | |
|---|---|---|---|---|---|---|---|---|
| AA | 27 | 28 | 29 | 30 | 35 | 36 | 37 | 38 |
| A | 0 | 0 | 0 | 0 | 0 | 0 | 0 | 7.7 |
| C | 0 | 0 | 0 | 0 | 0 | 0 | 0 | 0 |
| D | 0 | 0 | 0 | 0 | 92.3 | 15.4 | 0 | 0 |
| E | 0 | 0 | 0 | 0 | 0 | 0 | 0 | 0 |
| F | 0 | 38.5 | 0 | 7.7 | 0 | 0 | 0 | 0 |
| G | 100 | 0 | 0 | 0 | 7.7 | 0 | 0 | 0 |
| H | 0 | 0 | 0 | 0 | 0 | 7.7 | 61.5 | 0 |
| I | 0 | 0 | 0 | 0 | 0 | 0 | 0 | 0 |
| K | 0 | 0 | 0 | 0 | 0 | 0 | 0 | 0 |
| L | 0 | 0 | 0 | 92.3 | 0 | 0 | 0 | 0 |
| M | 0 | 0 | 0 | 0 | 0 | 0 | 0 | 0 |
| N | 0 | 0 | 0 | 0 | 0 | 0 | 0 | 0 |
| P | 0 | 0 | 0 | 0 | 0 | 0 | 0 | 0 |
| Q | 0 | 0 | 0 | 0 | 0 | 0 | 0 | 0 |
| R | 0 | 0 | 0 | 0 | 0 | 0 | 0 | 0 |
| S | 0 | 0 | 69.2 | 0 | 0 | 0 | 0 | 0 |
| T | 0 | 0 | 30.8 | 0 | 0 | 0 | 0 | 92.3 |
| V | 0 | 61.5 | 0 | 0 | 0 | 0 | 0 | 0 |
| W | 0 | 0 | 0 | 0 | 0 | 0 | 0 | 0 |
| Y | 0 | 0 | 0 | 0 | 0 | 76.9 | 38.5 | 0 |

TABLE 4-32
CDR2 amino acid frequency distribution
for cluster 33B1 (Group O)

| | Position | | | | | | | |
|---|---|---|---|---|---|---|---|---|
| AA | 56 | 57 | 58 | 59 | 62 | 63 | 64 | 65 |
| A | 0 | 0 | 0 | 0 | 0 | 0 | 0 | 0 |
| C | 0 | 0 | 0 | 0 | 0 | 0 | 0 | 0 |
| D | 0 | 7.7 | 0 | 7.7 | 100 | 0 | 0 | 0 |
| E | 0 | 0 | 0 | 0 | 0 | 0 | 0 | 0 |
| F | 0 | 0 | 0 | 7.7 | 0 | 0 | 0 | 0 |
| G | 0 | 0 | 0 | 0 | 0 | 100 | 0 | 0 |
| H | 0 | 0 | 7.7 | 7.7 | 0 | 0 | 0 | 0 |
| I | 100 | 0 | 0 | 7.7 | 0 | 0 | 0 | 7.7 |
| K | 0 | 0 | 0 | 0 | 0 | 0 | 0 | 0 |
| L | 0 | 0 | 0 | 0 | 0 | 0 | 0 | 0 |
| M | 0 | 0 | 0 | 0 | 0 | 0 | 0 | 0 |
| N | 0 | 23.1 | 7.7 | 69.2 | 0 | 0 | 0 | 0 |
| P | 0 | 0 | 0 | 0 | 0 | 0 | 0 | 0 |
| Q | 0 | 0 | 0 | 0 | 0 | 0 | 0 | 0 |
| R | 0 | 0 | 7.7 | 0 | 0 | 0 | 0 | 0 |
| S | 0 | 69.2 | 76.9 | 0 | 0 | 0 | 76.9 | 0 |
| T | 0 | 0 | 0 | 0 | 0 | 0 | 23.1 | 61.5 |
| V | 0 | 0 | 0 | 0 | 0 | 0 | 0 | 30.8 |
| W | 0 | 0 | 0 | 0 | 0 | 0 | 0 | 0 |
| Y | 0 | 0 | 0 | 0 | 0 | 0 | 0 | 0 |

TABLE 4-33
CDR3 amino acid frequency distribution for cluster 33B1 (Group O)

| | Position | | | | | | | | | |
|---|---|---|---|---|---|---|---|---|---|---|
| AA | 105 | 106 | 107 | 108 | 109 | 110 | 111 | 111.1 | 111.2 | 111.3 |
| A | 100 | 100 | 0 | 0 | 0 | 0 | 0 | 0 | 46.2 | 0 |
| C | 0 | 0 | 0 | 0 | 0 | 0 | 0 | 0 | 0 | 0 |
| D | 0 | 0 | 100 | 0 | 0 | 0 | 0 | 0 | 0 | 100 |
| E | 0 | 0 | 0 | 0 | 0 | 0 | 0 | 0 | 0 | 0 |
| F | 0 | 0 | 0 | 0 | 0 | 30.8 | 0 | 0 | 0 | 0 |
| G | 0 | 0 | 0 | 0 | 100 | 0 | 0 | 0 | 0 | 0 |
| H | 0 | 0 | 0 | 0 | 0 | 0 | 0 | 0 | 0 | 0 |
| I | 0 | 0 | 0 | 0 | 0 | 0 | 0 | 0 | 0 | 0 |
| K | 0 | 0 | 0 | 0 | 0 | 0 | 0 | 0 | 0 | 0 |
| L | 0 | 0 | 0 | 61.5 | 0 | 0 | 100 | 0 | 0 | 0 |
| M | 0 | 0 | 0 | 0 | 0 | 0 | 0 | 0 | 0 | 0 |
| N | 0 | 0 | 0 | 0 | 0 | 0 | 0 | 0 | 0 | 0 |
| P | 0 | 0 | 0 | 0 | 0 | 0 | 0 | 0 | 0 | 0 |
| Q | 0 | 0 | 0 | 0 | 0 | 0 | 0 | 0 | 0 | 0 |
| R | 0 | 0 | 0 | 0 | 0 | 0 | 0 | 0 | 0 | 0 |
| S | 0 | 0 | 0 | 0 | 0 | 0 | 0 | 0 | 0 | 0 |
| T | 0 | 0 | 0 | 0 | 0 | 0 | 0 | 0 | 23.1 | 0 |
| V | 0 | 0 | 0 | 38.5 | 0 | 61.5 | 0 | 0 | 30.8 | 0 |
| W | 0 | 0 | 0 | 0 | 0 | 0 | 0 | 0 | 0 | 0 |
| Y | 0 | 0 | 0 | 0 | 0 | 7.7 | 0 | 100 | 0 | 0 |

| | Position | | | | | | | | | | |
|---|---|---|---|---|---|---|---|---|---|---|---|
| AA | 111.4 | 112.4 | 112.3 | 112.2 | 112.1 | 112 | 113 | 114 | 115 | 116 | 117 |
| A | 0 | 0 | 0 | 0 | 0 | 0 | 0 | 0 | 0 | 0 | 0 |
| C | 0 | 0 | 0 | 0 | 0 | 0 | 0 | 0 | 0 | 0 | 0 |
| D | 0 | 0 | 0 | 0 | 0 | 0 | 0 | 0 | 0 | 0 | 0 |
| E | 0 | 0 | 0 | 0 | 0 | 0 | 0 | 0 | 0 | 0 | 0 |
| F | 0 | 0 | 0 | 0 | 0 | 0 | 0 | 0 | 100 | 0 | 0 |
| G | 0 | 0 | 0 | 0 | 0 | 0 | 0 | 0 | 0 | 100 | 0 |
| H | 0 | 0 | 0 | 0 | 92.3 | 0 | 100 | 100 | 0 | 0 | 0 |
| I | 0 | 0 | 0 | 0 | 0 | 0 | 0 | 0 | 0 | 0 | 0 |
| K | 0 | 0 | 0 | 0 | 0 | 0 | 0 | 0 | 0 | 0 | 0 |
| L | 0 | 0 | 0 | 100 | 0 | 0 | 0 | 0 | 0 | 0 | 0 |
| M | 0 | 0 | 0 | 0 | 0 | 46.2 | 0 | 0 | 0 | 0 | 0 |
| N | 0 | 0 | 0 | 0 | 0 | 0 | 0 | 0 | 0 | 0 | 0 |
| P | 0 | 0 | 15.4 | 0 | 0 | 0 | 0 | 0 | 0 | 0 | 0 |
| Q | 0 | 0 | 0 | 0 | 0 | 0 | 0 | 0 | 0 | 0 | 0 |
| R | 0 | 0 | 84.6 | 0 | 0 | 0 | 0 | 0 | 0 | 0 | 0 |
| S | 0 | 0 | 0 | 0 | 0 | 0 | 0 | 0 | 0 | 0 | 100 |
| T | 0 | 0 | 0 | 0 | 0 | 53.8 | 0 | 0 | 0 | 0 | 0 |
| V | 0 | 100 | 0 | 0 | 0 | 0 | 0 | 0 | 0 | 0 | 0 |
| W | 0 | 0 | 0 | 0 | 0 | 0 | 0 | 0 | 0 | 0 | 0 |
| Y | 100 | 0 | 0 | 0 | 7.7 | 0 | 0 | 0 | 0 | 0 | 0 |

TABLE 5
Sequence Identifiers of V-bodies identified from panning

| | CDR1 | CDR2 | CDR3 | VHH | |
|---|---|---|---|---|---|
| | Amino | Amino | Amino | Amino | VHH |
| | Acid | Acid | Acid | Acid | DNA |
| Group | Sequence | Sequence | Sequence | Sequence | Sequence |
| A | 1128 | 1687 | 2246 | 2805 | 3364 |
| A | 1129 | 1688 | 2247 | 2806 | 3365 |
| A | 1130 | 1689 | 2248 | 2807 | 3366 |
| A | 1131 | 1690 | 2249 | 2808 | 3367 |
| A | 1132 | 1691 | 2250 | 2809 | 3368 |
| A | 1133 | 1692 | 2251 | 2810 | 3369 |
| A | 1134 | 1693 | 2252 | 2811 | 3370 |
| A | 1135 | 1694 | 2253 | 2812 | 3371 |
| A | 1136 | 1695 | 2254 | 2813 | 3372 |
| A | 1137 | 1696 | 2255 | 2814 | 3373 |
| A | 1138 | 1697 | 2256 | 2815 | 3374 |
| A | 1139 | 1698 | 2257 | 2816 | 3375 |
| A | 1140 | 1699 | 2258 | 2817 | 3376 |
| A | 1141 | 1700 | 2259 | 2818 | 3377 |
| A | 1142 | 1701 | 2260 | 2819 | 3378 |
| A | 1143 | 1702 | 2261 | 2820 | 3379 |
| A | 1144 | 1703 | 2262 | 2821 | 3380 |
| A | 1145 | 1704 | 2263 | 2822 | 3381 |
| A | 1146 | 1705 | 2264 | 2823 | 3382 |
| A | 1147 | 1706 | 2265 | 2824 | 3383 |
| A | 1148 | 1707 | 2266 | 2825 | 3384 |
| A | 1149 | 1708 | 2267 | 2826 | 3385 |
| A | 1150 | 1709 | 2268 | 2827 | 3386 |
| A | 1151 | 1710 | 2269 | 2828 | 3387 |
| A | 1152 | 1711 | 2270 | 2829 | 3388 |
| A | 1153 | 1712 | 2271 | 2830 | 3389 |
| A | 1154 | 1713 | 2272 | 2831 | 3390 |
| A | 1155 | 1714 | 2273 | 2832 | 3391 |
| A | 1156 | 1715 | 2274 | 2833 | 3392 |
| A | 1157 | 1716 | 2275 | 2834 | 3393 |
| A | 1158 | 1717 | 2276 | 2835 | 3394 |
| A | 1159 | 1718 | 2277 | 2836 | 3395 |
| A | 1160 | 1719 | 2278 | 2837 | 3396 |
| A | 1161 | 1720 | 2279 | 2838 | 3397 |
| A | 1162 | 1721 | 2280 | 2839 | 3398 |
| A | 1163 | 1722 | 2281 | 2840 | 3399 |
| A | 1164 | 1723 | 2282 | 2841 | 3400 |
| A | 1165 | 1724 | 2283 | 2842 | 3401 |
| A | 1166 | 1725 | 2284 | 2843 | 3402 |
| A | 1167 | 1726 | 2285 | 2844 | 3403 |
| A | 1168 | 1727 | 2286 | 2845 | 3404 |
| A | 1169 | 1728 | 2287 | 2846 | 3405 |
| A | 1170 | 1729 | 2288 | 2847 | 3406 |
| A | 1171 | 1730 | 2289 | 2848 | 3407 |
| A | 1172 | 1731 | 2290 | 2849 | 3408 |
| A | 1173 | 1732 | 2291 | 2850 | 3409 |
| A | 1174 | 1733 | 2292 | 2851 | 3410 |
| A | 1175 | 1734 | 2293 | 2852 | 3411 |
| A | 1176 | 1735 | 2294 | 2853 | 3412 |
| A | 1177 | 1736 | 2295 | 2854 | 3413 |
| A | 1178 | 1737 | 2296 | 2855 | 3414 |
| A | 1179 | 1738 | 2297 | 2856 | 3415 |
| A | 1180 | 1739 | 2298 | 2857 | 3416 |
| A | 1181 | 1740 | 2299 | 2858 | 3417 |
| A | 1182 | 1741 | 2300 | 2859 | 3418 |
| A | 1183 | 1742 | 2301 | 2860 | 3419 |
| A | 1184 | 1743 | 2302 | 2861 | 3420 |
| A | 1185 | 1744 | 2303 | 2862 | 3421 |
| A | 1186 | 1745 | 2304 | 2863 | 3422 |
| A | 1187 | 1746 | 2305 | 2864 | 3423 |
| A | 1188 | 1747 | 2306 | 2865 | 3424 |
| A | 1189 | 1748 | 2307 | 2866 | 3425 |
| A | 1190 | 1749 | 2308 | 2867 | 3426 |
| A | 1191 | 1750 | 2309 | 2868 | 3427 |
| A | 1192 | 1751 | 2310 | 2869 | 3428 |
| A | 1193 | 1752 | 2311 | 2870 | 3429 |
| A | 1194 | 1753 | 2312 | 2871 | 3430 |
| A | 1195 | 1754 | 2313 | 2872 | 3431 |
| A | 1196 | 1755 | 2314 | 2873 | 3432 |
| A | 1197 | 1756 | 2315 | 2874 | 3433 |
| A | 1198 | 1757 | 2316 | 2875 | 3434 |
| A | 1199 | 1758 | 2317 | 2876 | 3435 |
| A | 1200 | 1759 | 2318 | 2877 | 3436 |
| A | 1201 | 1760 | 2319 | 2878 | 3437 |
| A | 1202 | 1761 | 2320 | 2879 | 3438 |
| A | 1203 | 1762 | 2321 | 2880 | 3439 |
| A | 1204 | 1763 | 2322 | 2881 | 3440 |
| A | 1205 | 1764 | 2323 | 2882 | 3441 |
| A | 1206 | 1765 | 2324 | 2883 | 3442 |
| A | 1207 | 1766 | 2325 | 2884 | 3443 |
| A | 1208 | 1767 | 2326 | 2885 | 3444 |
| A | 1209 | 1768 | 2327 | 2886 | 3445 |
| A | 1210 | 1769 | 2328 | 2887 | 3446 |
| A | 1211 | 1770 | 2329 | 2888 | 3447 |
| A | 1212 | 1771 | 2330 | 2889 | 3448 |
| A | 1213 | 1772 | 2331 | 2890 | 3449 |
| A | 1214 | 1773 | 2332 | 2891 | 3450 |
| A | 1215 | 1774 | 2333 | 2892 | 3451 |
| A | 1216 | 1775 | 2334 | 2893 | 3452 |
| A | 1217 | 1776 | 2335 | 2894 | 3453 |
| A | 1218 | 1777 | 2336 | 2895 | 3454 |
| A | 1219 | 1778 | 2337 | 2896 | 3455 |
| A | 1220 | 1779 | 2338 | 2897 | 3456 |
| A | 1221 | 1780 | 2339 | 2898 | 3457 |
| A | 1222 | 1781 | 2340 | 2899 | 3458 |
| A | 1223 | 1782 | 2341 | 2900 | 3459 |
| A | 1224 | 1783 | 2342 | 2901 | 3460 |
| A | 1225 | 1784 | 2343 | 2902 | 3461 |
| A | 1226 | 1785 | 2344 | 2903 | 3462 |
| A | 1227 | 1786 | 2345 | 2904 | 3463 |
| A | 1228 | 1787 | 2346 | 2905 | 3464 |
| A | 1229 | 1788 | 2347 | 2906 | 3465 |
| A | 1230 | 1789 | 2348 | 2907 | 3466 |
| A | 1231 | 1790 | 2349 | 2908 | 3467 |
| A | 1232 | 1791 | 2350 | 2909 | 3468 |
| A | 1233 | 1792 | 2351 | 2910 | 3469 |
| A | 1234 | 1793 | 2352 | 2911 | 3470 |
| A | 1235 | 1794 | 2353 | 2912 | 3471 |
| A | 1236 | 1795 | 2354 | 2913 | 3472 |
| A | 1237 | 1796 | 2355 | 2914 | 3473 |
| A | 1238 | 1797 | 2356 | 2915 | 3474 |
| A | 1239 | 1798 | 2357 | 2916 | 3475 |
| A | 1240 | 1799 | 2358 | 2917 | 3476 |
| A | 1241 | 1800 | 2359 | 2918 | 3477 |
| A | 1242 | 1801 | 2360 | 2919 | 3478 |
| A | 1243 | 1802 | 2361 | 2920 | 3479 |
| A | 1244 | 1803 | 2362 | 2921 | 3480 |
| A | 1245 | 1804 | 2363 | 2922 | 3481 |
| A | 1246 | 1805 | 2364 | 2923 | 3482 |
| A | 1247 | 1806 | 2365 | 2924 | 3483 |
| A | 1248 | 1807 | 2366 | 2925 | 3484 |
| A | 1249 | 1808 | 2367 | 2926 | 3485 |
| A | 1250 | 1809 | 2368 | 2927 | 3486 |
| A | 1251 | 1810 | 2369 | 2928 | 3487 |
| A | 1252 | 1811 | 2370 | 2929 | 3488 |
| A | 1253 | 1812 | 2371 | 2930 | 3489 |
| A | 1254 | 1813 | 2372 | 2931 | 3490 |
| A | 1255 | 1814 | 2373 | 2932 | 3491 |
| A | 1256 | 1815 | 2374 | 2933 | 3492 |
| A | 1257 | 1816 | 2375 | 2934 | 3493 |
| A | 1258 | 1817 | 2376 | 2935 | 3494 |
| A | 1259 | 1818 | 2377 | 2936 | 3495 |
| A | 1260 | 1819 | 2378 | 2937 | 3496 |
| A | 1261 | 1820 | 2379 | 2938 | 3497 |
| A | 1262 | 1821 | 2380 | 2939 | 3498 |
| A | 1263 | 1822 | 2381 | 2940 | 3499 |
| A | 1264 | 1823 | 2382 | 2941 | 3500 |
| A | 1265 | 1824 | 2383 | 2942 | 3501 |
| A | 1266 | 1825 | 2384 | 2943 | 3502 |
| A | 1267 | 1826 | 2385 | 2944 | 3503 |
| A | 1268 | 1827 | 2386 | 2945 | 3504 |
| A | 1269 | 1828 | 2387 | 2946 | 3505 |
| A | 1270 | 1829 | 2388 | 2947 | 3506 |
| A | 1271 | 1830 | 2389 | 2948 | 3507 |
| A | 1272 | 1831 | 2390 | 2949 | 3508 |
| A | 1273 | 1832 | 2391 | 2950 | 3509 |
| A | 1274 | 1833 | 2392 | 2951 | 3510 |
| A | 1275 | 1834 | 2393 | 2952 | 3511 |
| A | 1276 | 1835 | 2394 | 2953 | 3512 |
| A | 1277 | 1836 | 2395 | 2954 | 3513 |
| A | 1278 | 1837 | 2396 | 2955 | 3514 |
| A | 1279 | 1838 | 2397 | 2956 | 3515 |
| A | 1280 | 1839 | 2398 | 2957 | 3516 |
| A | 1281 | 1840 | 2399 | 2958 | 3517 |
| A | 1282 | 1841 | 2400 | 2959 | 3518 |
| A | 1283 | 1842 | 2401 | 2960 | 3519 |
| A | 1284 | 1843 | 2402 | 2961 | 3520 |
| A | 1285 | 1844 | 2403 | 2962 | 3521 |
| A | 1286 | 1845 | 2404 | 2963 | 3522 |
| A | 1287 | 1846 | 2405 | 2964 | 3523 |
| A | 1288 | 1847 | 2406 | 2965 | 3524 |
| A | 1289 | 1848 | 2407 | 2966 | 3525 |
| A | 1290 | 1849 | 2408 | 2967 | 3526 |
| A | 1291 | 1850 | 2409 | 2968 | 3527 |
| A | 1292 | 1851 | 2410 | 2969 | 3528 |
| A | 1293 | 1852 | 2411 | 2970 | 3529 |
| A | 1294 | 1853 | 2412 | 2971 | 3530 |
| A | 1295 | 1854 | 2413 | 2972 | 3531 |
| A | 1296 | 1855 | 2414 | 2973 | 3532 |
| A | 1297 | 1856 | 2415 | 2974 | 3533 |
| A | 1298 | 1857 | 2416 | 2975 | 3534 |
| A | 1299 | 1858 | 2417 | 2976 | 3535 |
| A | 1300 | 1859 | 2418 | 2977 | 3536 |
| A | 1301 | 1860 | 2419 | 2978 | 3537 |
| A | 1302 | 1861 | 2420 | 2979 | 3538 |
| A | 1303 | 1862 | 2421 | 2980 | 3539 |
| A | 1304 | 1863 | 2422 | 2981 | 3540 |
| A | 1305 | 1864 | 2423 | 2982 | 3541 |
| A | 1306 | 1865 | 2424 | 2983 | 3542 |
| A | 1307 | 1866 | 2425 | 2984 | 3543 |
| A | 1308 | 1867 | 2426 | 2985 | 3544 |
| A | 1309 | 1868 | 2427 | 2986 | 3545 |
| A | 1310 | 1869 | 2428 | 2987 | 3546 |
| A | 1311 | 1870 | 2429 | 2988 | 3547 |
| A | 1312 | 1871 | 2430 | 2989 | 3548 |
| A | 1313 | 1872 | 2431 | 2990 | 3549 |
| A | 1314 | 1873 | 2432 | 2991 | 3550 |
| A | 1315 | 1874 | 2433 | 2992 | 3551 |
| A | 1316 | 1875 | 2434 | 2993 | 3552 |
| A | 1317 | 1876 | 2435 | 2994 | 3553 |
| A | 1318 | 1877 | 2436 | 2995 | 3554 |
| A | 1319 | 1878 | 2437 | 2996 | 3555 |
| A | 1320 | 1879 | 2438 | 2997 | 3556 |
| A | 1321 | 1880 | 2439 | 2998 | 3557 |
| A | 1322 | 1881 | 2440 | 2999 | 3558 |
| A | 1323 | 1882 | 2441 | 3000 | 3559 |
| A | 1324 | 1883 | 2442 | 3001 | 3560 |
| A | 1325 | 1884 | 2443 | 3002 | 3561 |
| A | 1326 | 1885 | 2444 | 3003 | 3562 |
| A | 1327 | 1886 | 2445 | 3004 | 3563 |
| A | 1328 | 1887 | 2446 | 3005 | 3564 |
| A | 1329 | 1888 | 2447 | 3006 | 3565 |
| A | 1330 | 1889 | 2448 | 3007 | 3566 |
| A | 1331 | 1890 | 2449 | 3008 | 3567 |
| A | 1332 | 1891 | 2450 | 3009 | 3568 |
| A | 1333 | 1892 | 2451 | 3010 | 3569 |
| A | 1334 | 1893 | 2452 | 3011 | 3570 |
| A | 1335 | 1894 | 2453 | 3012 | 3571 |
| A | 1336 | 1895 | 2454 | 3013 | 3572 |
| A | 1337 | 1896 | 2455 | 3014 | 3573 |
| A | 1338 | 1897 | 2456 | 3015 | 3574 |
| A | 1339 | 1898 | 2457 | 3016 | 3575 |
| A | 1340 | 1899 | 2458 | 3017 | 3576 |
| A | 1341 | 1900 | 2459 | 3018 | 3577 |
| A | 1342 | 1901 | 2460 | 3019 | 3578 |
| A | 1343 | 1902 | 2461 | 3020 | 3579 |
| A | 1344 | 1903 | 2462 | 3021 | 3580 |
| A | 1345 | 1904 | 2463 | 3022 | 3581 |
| A | 1346 | 1905 | 2464 | 3023 | 3582 |
| A | 1347 | 1906 | 2465 | 3024 | 3583 |
| A | 1348 | 1907 | 2466 | 3025 | 3584 |
| A | 1349 | 1908 | 2467 | 3026 | 3585 |
| A | 1350 | 1909 | 2468 | 3027 | 3586 |
| A | 1351 | 1910 | 2469 | 3028 | 3587 |
| A | 1352 | 1911 | 2470 | 3029 | 3588 |
| A | 1353 | 1912 | 2471 | 3030 | 3589 |
| A | 1354 | 1913 | 2472 | 3031 | 3590 |
| A | 1355 | 1914 | 2473 | 3032 | 3591 |
| A | 1356 | 1915 | 2474 | 3033 | 3592 |
| A | 1357 | 1916 | 2475 | 3034 | 3593 |
| A | 1358 | 1917 | 2476 | 3035 | 3594 |
| A | 1359 | 1918 | 2477 | 3036 | 3595 |
| A | 1360 | 1919 | 2478 | 3037 | 3596 |
| A | 1361 | 1920 | 2479 | 3038 | 3597 |
| A | 1362 | 1921 | 2480 | 3039 | 3598 |
| A | 1363 | 1922 | 2481 | 3040 | 3599 |
| A | 1364 | 1923 | 2482 | 3041 | 3600 |
| A | 1365 | 1924 | 2483 | 3042 | 3601 |
| A | 1366 | 1925 | 2484 | 3043 | 3602 |
| A | 1367 | 1926 | 2485 | 3044 | 3603 |
| A | 1368 | 1927 | 2486 | 3045 | 3604 |
| A | 1369 | 1928 | 2487 | 3046 | 3605 |
| A | 1370 | 1929 | 2488 | 3047 | 3606 |
| A | 1371 | 1930 | 2489 | 3048 | 3607 |
| A | 1372 | 1931 | 2490 | 3049 | 3608 |
| A | 1373 | 1932 | 2491 | 3050 | 3609 |
| A | 1374 | 1933 | 2492 | 3051 | 3610 |
| A | 1375 | 1934 | 2493 | 3052 | 3611 |
| A | 1376 | 1935 | 2494 | 3053 | 3612 |
| A | 1377 | 1936 | 2495 | 3054 | 3613 |
| A | 1378 | 1937 | 2496 | 3055 | 3614 |
| A | 1379 | 1938 | 2497 | 3056 | 3615 |
| A | 1380 | 1939 | 2498 | 3057 | 3616 |
| A | 1381 | 1940 | 2499 | 3058 | 3617 |
| A | 1382 | 1941 | 2500 | 3059 | 3618 |
| A | 1383 | 1942 | 2501 | 3060 | 3619 |
| A | 1384 | 1943 | 2502 | 3061 | 3620 |
| A | 1385 | 1944 | 2503 | 3062 | 3621 |
| A | 1386 | 1945 | 2504 | 3063 | 3622 |
| A | 1387 | 1946 | 2505 | 3064 | 3623 |
| A | 1388 | 1947 | 2506 | 3065 | 3624 |
| A | 1389 | 1948 | 2507 | 3066 | 3625 |
| A | 1390 | 1949 | 2508 | 3067 | 3626 |
| A | 1391 | 1950 | 2509 | 3068 | 3627 |
| A | 1392 | 1951 | 2510 | 3069 | 3628 |
| A | 1393 | 1952 | 2511 | 3070 | 3629 |
| A | 1394 | 1953 | 2512 | 3071 | 3630 |
| A | 1395 | 1954 | 2513 | 3072 | 3631 |
| A | 1396 | 1955 | 2514 | 3073 | 3632 |
| A | 1397 | 1956 | 2515 | 3074 | 3633 |
| A | 1398 | 1957 | 2516 | 3075 | 3634 |
| A | 1399 | 1958 | 2517 | 3076 | 3635 |
| A | 1400 | 1959 | 2518 | 3077 | 3636 |
| A | 1401 | 1960 | 2519 | 3078 | 3637 |
| A | 1402 | 1961 | 2520 | 3079 | 3638 |
| A | 1403 | 1962 | 2521 | 3080 | 3639 |
| A | 1404 | 1963 | 2522 | 3081 | 3640 |
| A | 1405 | 1964 | 2523 | 3082 | 3641 |
| A | 1406 | 1965 | 2524 | 3083 | 3642 |
| A | 1407 | 1966 | 2525 | 3084 | 3643 |
| A | 1408 | 1967 | 2526 | 3085 | 3644 |
| A | 1409 | 1968 | 2527 | 3086 | 3645 |
| A | 1410 | 1969 | 2528 | 3087 | 3646 |
| A | 1411 | 1970 | 2529 | 3088 | 3647 |
| A | 1412 | 1971 | 2530 | 3089 | 3648 |
| A | 1413 | 1972 | 2531 | 3090 | 3649 |
| A | 1414 | 1973 | 2532 | 3091 | 3650 |
| A | 1415 | 1974 | 2533 | 3092 | 3651 |
| A | 1416 | 1975 | 2534 | 3093 | 3652 |
| A | 1417 | 1976 | 2535 | 3094 | 3653 |
| A | 1418 | 1977 | 2536 | 3095 | 3654 |
| A | 1419 | 1978 | 2537 | 3096 | 3655 |
| A | 1420 | 1979 | 2538 | 3097 | 3656 |
| A | 1421 | 1980 | 2539 | 3098 | 3657 |
| A | 1422 | 1981 | 2540 | 3099 | 3658 |
| A | 1423 | 1982 | 2541 | 3100 | 3659 |
| A | 1424 | 1983 | 2542 | 3101 | 3660 |
| A | 1425 | 1984 | 2543 | 3102 | 3661 |
| A | 1426 | 1985 | 2544 | 3103 | 3662 |
| A | 1427 | 1986 | 2545 | 3104 | 3663 |
| A | 1428 | 1987 | 2546 | 3105 | 3664 |
| B | 1429 | 1988 | 2547 | 3106 | 3665 |
| B | 1430 | 1989 | 2548 | 3107 | 3666 |
| B | 1431 | 1990 | 2549 | 3108 | 3667 |
| B | 1432 | 1991 | 2550 | 3109 | 3668 |
| B | 1433 | 1992 | 2551 | 3110 | 3669 |
| B | 1434 | 1993 | 2552 | 3111 | 3670 |
| B | 1435 | 1994 | 2553 | 3112 | 3671 |
| B | 1436 | 1995 | 2554 | 3113 | 3672 |
| B | 1437 | 1996 | 2555 | 3114 | 3673 |
| B | 1438 | 1997 | 2556 | 3115 | 3674 |
| B | 4173 | 4235 | 4297 | 4359 | 4421 |
| B | 4174 | 4236 | 4298 | 4360 | 4422 |
| B | 4533 | 4557 | 4581 | 4605 | 4629 |
| B | 4534 | 4558 | 4582 | 4606 | 4630 |
| B | 4535 | 4559 | 4583 | 4607 | 4631 |
| B | 4536 | 4560 | 4584 | 4608 | 4632 |
| B | 4537 | 4561 | 4585 | 4609 | 4633 |
| B | 4538 | 4562 | 4586 | 4610 | 4634 |
| C | 1439 | 1998 | 2557 | 3116 | 3675 |
| C | 1440 | 1999 | 2558 | 3117 | 3676 |
| C | 1441 | 2000 | 2559 | 3118 | 3677 |
| C | 1442 | 2001 | 2560 | 3119 | 3678 |
| C | 1443 | 2002 | 2561 | 3120 | 3679 |
| C | 1444 | 2003 | 2562 | 3121 | 3680 |
| C | 1445 | 2004 | 2563 | 3122 | 3681 |
| C | 1446 | 2005 | 2564 | 3123 | 3682 |
| C | 1447 | 2006 | 2565 | 3124 | 3683 |
| C | 1448 | 2007 | 2566 | 3125 | 3684 |
| C | 1449 | 2008 | 2567 | 3126 | 3685 |
| D | 1450 | 2009 | 2568 | 3127 | 3686 |
| D | 1451 | 2010 | 2569 | 3128 | 3687 |
| D | 1452 | 2011 | 2570 | 3129 | 3688 |
| D | 1453 | 2012 | 2571 | 3130 | 3689 |
| D | 1454 | 2013 | 2572 | 3131 | 3690 |
| D | 1455 | 2014 | 2573 | 3132 | 3691 |
| D | 1456 | 2015 | 2574 | 3133 | 3692 |
| D | 1457 | 2016 | 2575 | 3134 | 3693 |
| D | 1458 | 2017 | 2576 | 3135 | 3694 |
| D | 1459 | 2018 | 2577 | 3136 | 3695 |
| D | 1460 | 2019 | 2578 | 3137 | 3696 |
| D | 1461 | 2020 | 2579 | 3138 | 3697 |
| D | 1462 | 2021 | 2580 | 3139 | 3698 |
| D | 1463 | 2022 | 2581 | 3140 | 3699 |
| D | 1464 | 2023 | 2582 | 3141 | 3700 |
| D | 1465 | 2024 | 2583 | 3142 | 3701 |
| D | 1466 | 2025 | 2584 | 3143 | 3702 |
| D | 1467 | 2026 | 2585 | 3144 | 3703 |
| D | 1468 | 2027 | 2586 | 3145 | 3704 |
| D | 1469 | 2028 | 2587 | 3146 | 3705 |
| D | 1470 | 2029 | 2588 | 3147 | 3706 |
| D | 1471 | 2030 | 2589 | 3148 | 3707 |
| D | 1472 | 2031 | 2590 | 3149 | 3708 |
| D | 1473 | 2032 | 2591 | 3150 | 3709 |
| D | 1474 | 2033 | 2592 | 3151 | 3710 |
| D | 1475 | 2034 | 2593 | 3152 | 3711 |
| D | 1476 | 2035 | 2594 | 3153 | 3712 |
| D | 1477 | 2036 | 2595 | 3154 | 3713 |
| D | 1478 | 2037 | 2596 | 3155 | 3714 |
| D | 1479 | 2038 | 2597 | 3156 | 3715 |
| D | 1480 | 2039 | 2598 | 3157 | 3716 |
| D | 1481 | 2040 | 2599 | 3158 | 3717 |
| D | 1482 | 2041 | 2600 | 3159 | 3718 |
| D | 1483 | 2042 | 2601 | 3160 | 3719 |
| D | 1484 | 2043 | 2602 | 3161 | 3720 |
| D | 1485 | 2044 | 2603 | 3162 | 3721 |
| D | 1486 | 2045 | 2604 | 3163 | 3722 |
| D | 1487 | 2046 | 2605 | 3164 | 3723 |
| D | 1488 | 2047 | 2606 | 3165 | 3724 |
| D | 1489 | 2048 | 2607 | 3166 | 3725 |
| D | 1490 | 2049 | 2608 | 3167 | 3726 |
| D | 1491 | 2050 | 2609 | 3168 | 3727 |
| D | 1492 | 2051 | 2610 | 3169 | 3728 |
| D | 1493 | 2052 | 2611 | 3170 | 3729 |
| D | 1494 | 2053 | 2612 | 3171 | 3730 |
| D | 1495 | 2054 | 2613 | 3172 | 3731 |
| D | 1496 | 2055 | 2614 | 3173 | 3732 |
| D | 1497 | 2056 | 2615 | 3174 | 3733 |
| D | 1498 | 2057 | 2616 | 3175 | 3734 |
| D | 1499 | 2058 | 2617 | 3176 | 3735 |
| D | 1500 | 2059 | 2618 | 3177 | 3736 |
| D | 1501 | 2060 | 2619 | 3178 | 3737 |
| D | 1502 | 2061 | 2620 | 3179 | 3738 |
| D | 1503 | 2062 | 2621 | 3180 | 3739 |
| D | 1504 | 2063 | 2622 | 3181 | 3740 |
| D | 1505 | 2064 | 2623 | 3182 | 3741 |
| D | 1506 | 2065 | 2624 | 3183 | 3742 |
| D | 1507 | 2066 | 2625 | 3184 | 3743 |
| D | 1508 | 2067 | 2626 | 3185 | 3744 |
| D | 1509 | 2068 | 2627 | 3186 | 3745 |
| D | 1510 | 2069 | 2628 | 3187 | 3746 |
| D | 1511 | 2070 | 2629 | 3188 | 3747 |
| D | 1512 | 2071 | 2630 | 3189 | 3748 |
| D | 1513 | 2072 | 2631 | 3190 | 3749 |
| D | 1514 | 2073 | 2632 | 3191 | 3750 |
| D | 1515 | 2074 | 2633 | 3192 | 3751 |
| D | 1516 | 2075 | 2634 | 3193 | 3752 |
| D | 1517 | 2076 | 2635 | 3194 | 3753 |
| D | 1518 | 2077 | 2636 | 3195 | 3754 |
| D | 1519 | 2078 | 2637 | 3196 | 3755 |
| D | 1520 | 2079 | 2638 | 3197 | 3756 |
| D | 1521 | 2080 | 2639 | 3198 | 3757 |
| D | 1522 | 2081 | 2640 | 3199 | 3758 |
| D | 1523 | 2082 | 2641 | 3200 | 3759 |
| D | 1524 | 2083 | 2642 | 3201 | 3760 |
| D | 1525 | 2084 | 2643 | 3202 | 3761 |
| D | 1526 | 2085 | 2644 | 3203 | 3762 |
| D | 1527 | 2086 | 2645 | 3204 | 3763 |
| D | 1528 | 2087 | 2646 | 3205 | 3764 |
| D | 4175 | 4237 | 4299 | 4361 | 4423 |
| D | 4176 | 4238 | 4300 | 4362 | 4424 |
| D | 4177 | 4239 | 4301 | 4363 | 4425 |
| D | 4178 | 4240 | 4302 | 4364 | 4426 |
| D | 4179 | 4241 | 4303 | 4365 | 4427 |
| D | 4180 | 4242 | 4304 | 4366 | 4428 |
| D | 4181 | 4243 | 4305 | 4367 | 4429 |
| D | 4182 | 4244 | 4306 | 4368 | 4430 |
| D | 4183 | 4245 | 4307 | 4369 | 4431 |
| D | 4184 | 4246 | 4308 | 4370 | 4432 |
| D | 4539 | 4563 | 4587 | 4611 | 4635 |
| D | 4540 | 4564 | 4588 | 4612 | 4636 |
| D | 4541 | 4565 | 4589 | 4613 | 4637 |
| D | 4542 | 4566 | 4590 | 4614 | 4638 |
| D | 4543 | 4567 | 4591 | 4615 | 4639 |
| D | 4544 | 4568 | 4592 | 4616 | 4640 |
| D | 4545 | 4569 | 4593 | 4617 | 4641 |
| D | 4546 | 4570 | 4594 | 4618 | 4642 |
| D | 4547 | 4571 | 4595 | 4619 | 4643 |
| D | 4548 | 4572 | 4596 | 4620 | 4644 |
| D | 4549 | 4573 | 4597 | 4621 | 4645 |
| D | 4550 | 4574 | 4598 | 4622 | 4646 |
| G | 1529 | 2088 | 2647 | 3206 | 3765 |
| G | 1530 | 2089 | 2648 | 3207 | 3766 |
| G | 1531 | 2090 | 2649 | 3208 | 3767 |
| J | 1532 | 2091 | 2650 | 3209 | 3768 |
| J | 1533 | 2092 | 2651 | 3210 | 3769 |
| J | 1534 | 2093 | 2652 | 3211 | 3770 |
| J | 1535 | 2094 | 2653 | 3212 | 3771 |
| J | 1536 | 2095 | 2654 | 3213 | 3772 |
| J | 1537 | 2096 | 2655 | 3214 | 3773 |
| J | 1538 | 2097 | 2656 | 3215 | 3774 |
| J | 1539 | 2098 | 2657 | 3216 | 3775 |
| J | 1540 | 2099 | 2658 | 3217 | 3776 |
| J | 1541 | 2100 | 2659 | 3218 | 3777 |
| J | 1542 | 2101 | 2660 | 3219 | 3778 |
| J | 1543 | 2102 | 2661 | 3220 | 3779 |
| J | 1544 | 2103 | 2662 | 3221 | 3780 |
| J | 1545 | 2104 | 2663 | 3222 | 3781 |
| J | 1546 | 2105 | 2664 | 3223 | 3782 |
| J | 1547 | 2106 | 2665 | 3224 | 3783 |
| J | 1548 | 2107 | 2666 | 3225 | 3784 |
| J | 1549 | 2108 | 2667 | 3226 | 3785 |
| J | 1550 | 2109 | 2668 | 3227 | 3786 |
| J | 1551 | 2110 | 2669 | 3228 | 3787 |
| J | 1552 | 2111 | 2670 | 3229 | 3788 |
| J | 1553 | 2112 | 2671 | 3230 | 3789 |
| J | 1554 | 2113 | 2672 | 3231 | 3790 |
| J | 1555 | 2114 | 2673 | 3232 | 3791 |
| J | 1556 | 2115 | 2674 | 3233 | 3792 |
| J | 1557 | 2116 | 2675 | 3234 | 3793 |
| J | 1558 | 2117 | 2676 | 3235 | 3794 |
| J | 1559 | 2118 | 2677 | 3236 | 3795 |
| J | 1560 | 2119 | 2678 | 3237 | 3796 |
| J | 1561 | 2120 | 2679 | 3238 | 3797 |
| J | 1562 | 2121 | 2680 | 3239 | 3798 |
| J | 1563 | 2122 | 2681 | 3240 | 3799 |
| J | 1564 | 2123 | 2682 | 3241 | 3800 |
| J | 1565 | 2124 | 2683 | 3242 | 3801 |
| J | 1566 | 2125 | 2684 | 3243 | 3802 |
| J | 1567 | 2126 | 2685 | 3244 | 3803 |
| J | 1568 | 2127 | 2686 | 3245 | 3804 |
| J | 1569 | 2128 | 2687 | 3246 | 3805 |
| J | 1570 | 2129 | 2688 | 3247 | 3806 |
| J | 1571 | 2130 | 2689 | 3248 | 3807 |
| J | 1572 | 2131 | 2690 | 3249 | 3808 |
| J | 1573 | 2132 | 2691 | 3250 | 3809 |
| J | 1574 | 2133 | 2692 | 3251 | 3810 |
| J | 1575 | 2134 | 2693 | 3252 | 3811 |
| J | 1576 | 2135 | 2694 | 3253 | 3812 |
| J | 1577 | 2136 | 2695 | 3254 | 3813 |
| J | 1578 | 2137 | 2696 | 3255 | 3814 |
| J | 1579 | 2138 | 2697 | 3256 | 3815 |
| J | 1580 | 2139 | 2698 | 3257 | 3816 |
| J | 1581 | 2140 | 2699 | 3258 | 3817 |
| K | 1582 | 2141 | 2700 | 3259 | 3818 |
| K | 1583 | 2142 | 2701 | 3260 | 3819 |
| K | 1584 | 2143 | 2702 | 3261 | 3820 |
| K | 1585 | 2144 | 2703 | 3262 | 3821 |
| K | 1586 | 2145 | 2704 | 3263 | 3822 |
| K | 1587 | 2146 | 2705 | 3264 | 3823 |
| K | 1588 | 2147 | 2706 | 3265 | 3824 |
| K | 1589 | 2148 | 2707 | 3266 | 3825 |
| K | 1590 | 2149 | 2708 | 3267 | 3826 |
| K | 1591 | 2150 | 2709 | 3268 | 3827 |
| K | 1592 | 2151 | 2710 | 3269 | 3828 |
| K | 1593 | 2152 | 2711 | 3270 | 3829 |
| K | 1594 | 2153 | 2712 | 3271 | 3830 |
| K | 1595 | 2154 | 2713 | 3272 | 3831 |
| K | 1596 | 2155 | 2714 | 3273 | 3832 |
| K | 1597 | 2156 | 2715 | 3274 | 3833 |
| K | 1598 | 2157 | 2716 | 3275 | 3834 |
| K | 1599 | 2158 | 2717 | 3276 | 3835 |
| K | 1600 | 2159 | 2718 | 3277 | 3836 |
| K | 1601 | 2160 | 2719 | 3278 | 3837 |
| K | 1602 | 2161 | 2720 | 3279 | 3838 |
| K | 1603 | 2162 | 2721 | 3280 | 3839 |
| K | 1604 | 2163 | 2722 | 3281 | 3840 |
| K | 1605 | 2164 | 2723 | 3282 | 3841 |
| K | 1606 | 2165 | 2724 | 3283 | 3842 |
| K | 1607 | 2166 | 2725 | 3284 | 3843 |
| K | 4185 | 4247 | 4309 | 4371 | 4433 |
| K | 4186 | 4248 | 4310 | 4372 | 4434 |
| K | 4187 | 4249 | 4311 | 4373 | 4435 |
| K | 4188 | 4250 | 4312 | 4374 | 4436 |
| K | 4189 | 4251 | 4313 | 4375 | 4437 |
| K | 4190 | 4252 | 4314 | 4376 | 4438 |
| K | 4191 | 4253 | 4315 | 4377 | 4439 |
| K | 4192 | 4254 | 4316 | 4378 | 4440 |
| K | 4193 | 4255 | 4317 | 4379 | 4441 |
| K | 4194 | 4256 | 4318 | 4380 | 4442 |
| K | 4195 | 4257 | 4319 | 4381 | 4443 |
| K | 4196 | 4258 | 4320 | 4382 | 4444 |
| K | 4197 | 4259 | 4321 | 4383 | 4445 |
| K | 4198 | 4260 | 4322 | 4384 | 4446 |
| K | 4199 | 4261 | 4323 | 4385 | 4447 |
| K | 4200 | 4262 | 4324 | 4386 | 4448 |
| K | 4201 | 4263 | 4325 | 4387 | 4449 |
| K | 4202 | 4264 | 4326 | 4388 | 4450 |
| K | 4203 | 4265 | 4327 | 4389 | 4451 |
| K | 4204 | 4266 | 4328 | 4390 | 4452 |
| K | 4205 | 4267 | 4329 | 4391 | 4453 |
| K | 4206 | 4268 | 4330 | 4392 | 4454 |
| K | 4207 | 4269 | 4331 | 4393 | 4455 |
| K | 4208 | 4270 | 4332 | 4394 | 4456 |
| K | 4209 | 4271 | 4333 | 4395 | 4457 |
| K | 4551 | 4575 | 4599 | 4623 | 4647 |
| K | 4552 | 4576 | 4600 | 4624 | 4648 |
| K | 4553 | 4577 | 4601 | 4625 | 4649 |
| K | 4554 | 4578 | 4602 | 4626 | 4650 |
| K | 4555 | 4579 | 4603 | 4627 | 4651 |
| K | 4556 | 4580 | 4604 | 4628 | 4652 |
| L | 1608 | 2167 | 2726 | 3285 | 3844 |
| M | 1609 | 2168 | 2727 | 3286 | 3845 |
| M | 1610 | 2169 | 2728 | 3287 | 3846 |
| M | 1611 | 2170 | 2729 | 3288 | 3847 |
| M | 1612 | 2171 | 2730 | 3289 | 3848 |
| M | 1613 | 2172 | 2731 | 3290 | 3849 |
| M | 1614 | 2173 | 2732 | 3291 | 3850 |
| M | 1615 | 2174 | 2733 | 3292 | 3851 |
| M | 1616 | 2175 | 2734 | 3293 | 3852 |
| M | 1617 | 2176 | 2735 | 3294 | 3853 |
| M | 1618 | 2177 | 2736 | 3295 | 3854 |
| M | 1619 | 2178 | 2737 | 3296 | 3855 |
| M | 1620 | 2179 | 2738 | 3297 | 3856 |
| M | 1621 | 2180 | 2739 | 3298 | 3857 |
| M | 1622 | 2181 | 2740 | 3299 | 3858 |
| M | 1623 | 2182 | 2741 | 3300 | 3859 |
| M | 1624 | 2183 | 2742 | 3301 | 3860 |
| M | 1625 | 2184 | 2743 | 3302 | 3861 |
| M | 1626 | 2185 | 2744 | 3303 | 3862 |
| M | 1627 | 2186 | 2745 | 3304 | 3863 |
| M | 1628 | 2187 | 2746 | 3305 | 3864 |
| M | 1629 | 2188 | 2747 | 3306 | 3865 |
| M | 1630 | 2189 | 2748 | 3307 | 3866 |
| M | 1631 | 2190 | 2749 | 3308 | 3867 |
| M | 1632 | 2191 | 2750 | 3309 | 3868 |
| M | 1633 | 2192 | 2751 | 3310 | 3869 |
| M | 1634 | 2193 | 2752 | 3311 | 3870 |
| M | 1635 | 2194 | 2753 | 3312 | 3871 |
| M | 1636 | 2195 | 2754 | 3313 | 3872 |
| M | 1637 | 2196 | 2755 | 3314 | 3873 |
| M | 1638 | 2197 | 2756 | 3315 | 3874 |
| M | 1639 | 2198 | 2757 | 3316 | 3875 |
| M | 1640 | 2199 | 2758 | 3317 | 3876 |
| M | 1641 | 2200 | 2759 | 3318 | 3877 |
| M | 1642 | 2201 | 2760 | 3319 | 3878 |
| M | 1643 | 2202 | 2761 | 3320 | 3879 |
| M | 1644 | 2203 | 2762 | 3321 | 3880 |
| M | 1645 | 2204 | 2763 | 3322 | 3881 |
| M | 1646 | 2205 | 2764 | 3323 | 3882 |
| M | 1647 | 2206 | 2765 | 3324 | 3883 |
| M | 1648 | 2207 | 2766 | 3325 | 3884 |
| M | 1649 | 2208 | 2767 | 3326 | 3885 |
| M | 1650 | 2209 | 2768 | 3327 | 3886 |
| M | 1651 | 2210 | 2769 | 3328 | 3887 |
| M | 1652 | 2211 | 2770 | 3329 | 3888 |
| M | 1653 | 2212 | 2771 | 3330 | 3889 |
| M | 1654 | 2213 | 2772 | 3331 | 3890 |
| M | 1655 | 2214 | 2773 | 3332 | 3891 |
| M | 1656 | 2215 | 2774 | 3333 | 3892 |
| M | 1657 | 2216 | 2775 | 3334 | 3893 |
| M | 1658 | 2217 | 2776 | 3335 | 3894 |
| M | 1659 | 2218 | 2777 | 3336 | 3895 |
| M | 1660 | 2219 | 2778 | 3337 | 3896 |
| M | 1661 | 2220 | 2779 | 3338 | 3897 |
| M | 1662 | 2221 | 2780 | 3339 | 3898 |
| M | 1663 | 2222 | 2781 | 3340 | 3899 |
| M | 1664 | 2223 | 2782 | 3341 | 3900 |
| M | 1665 | 2224 | 2783 | 3342 | 3901 |
| M | 1666 | 2225 | 2784 | 3343 | 3902 |
| M | 1667 | 2226 | 2785 | 3344 | 3903 |
| M | 1668 | 2227 | 2786 | 3345 | 3904 |
| M | 1669 | 2228 | 2787 | 3346 | 3905 |
| M | 1670 | 2229 | 2788 | 3347 | 3906 |
| M | 1671 | 2230 | 2789 | 3348 | 3907 |
| M | 1672 | 2231 | 2790 | 3349 | 3908 |
| M | 1673 | 2232 | 2791 | 3350 | 3909 |
| M | 1674 | 2233 | 2792 | 3351 | 3910 |
| M | 1675 | 2234 | 2793 | 3352 | 3911 |
| M | 1676 | 2235 | 2794 | 3353 | 3912 |
| M | 1677 | 2236 | 2795 | 3354 | 3913 |
| M | 1678 | 2237 | 2796 | 3355 | 3914 |
| M | 1679 | 2238 | 2797 | 3356 | 3915 |
| M | 1680 | 2239 | 2798 | 3357 | 3916 |
| M | 1681 | 2240 | 2799 | 3358 | 3917 |
| M | 1682 | 2241 | 2800 | 3359 | 3918 |
| M | 1683 | 2242 | 2801 | 3360 | 3919 |
| M | 1684 | 2243 | 2802 | 3361 | 3920 |
| M | 1685 | 2244 | 2803 | 3362 | 3921 |
| M | 1686 | 2245 | 2804 | 3363 | 3922 |
| M | 4210 | 4272 | 4334 | 4396 | 4458 |
| M | 4211 | 4273 | 4335 | 4397 | 4459 |
| M | 4212 | 4274 | 4336 | 4398 | 4460 |
| N | 4213 | 4275 | 4337 | 4399 | 4461 |
| N | 4214 | 4276 | 4338 | 4400 | 4462 |
| N | 4215 | 4277 | 4339 | 4401 | 4463 |
| N | 4216 | 4278 | 4340 | 4402 | 4464 |
| N | 4217 | 4279 | 4341 | 4403 | 4465 |
| N | 4218 | 4280 | 4342 | 4404 | 4466 |
| N | 4219 | 4281 | 4343 | 4405 | 4467 |
| N | 4220 | 4282 | 4344 | 4406 | 4468 |
| N | 4221 | 4283 | 4345 | 4407 | 4469 |
| O | 4222 | 4284 | 4346 | 4408 | 4470 |
| O | 4223 | 4285 | 4347 | 4409 | 4471 |
| O | 4224 | 4286 | 4348 | 4410 | 4472 |
| O | 4225 | 4287 | 4349 | 4411 | 4473 |
| O | 4226 | 4288 | 4350 | 4412 | 4474 |
| O | 4227 | 4289 | 4351 | 4413 | 4475 |
| O | 4228 | 4290 | 4352 | 4414 | 4476 |
| O | 4229 | 4291 | 4353 | 4415 | 4477 |
| O | 4230 | 4292 | 4354 | 4416 | 4478 |
| O | 4231 | 4293 | 4355 | 4417 | 4479 |
| O | 4232 | 4294 | 4356 | 4418 | 4480 |
| O | 4233 | 4295 | 4357 | 4419 | 4481 |
| O | 4234 | 4296 | 4358 | 4420 | 4482 |

### Example 4. Flow Cytometry Binding

[0621] To measure the binding of V-bodies to cell-displayed TNFR2 from human, cynomolgus or mouse, HEK293 cells were transfected with plasmids encoding for respective antigens. After 48 to 72 hours, binding was measured by incubation of His-tagged V-bodies with cells at various fixed concentrations, followed by washing and detection with Alexa488 fluorophore-labelled anti-His antibodies. To detect the binding of V-bodies to specific cysteine-rich domains (CRDs) of TNFR2, binding to HEK293 transfected with constructs where a single CRD was exchanged for camel CRD was measured. Lack of binding to a particular construct indicated binding to the domain which was exchanged.

[0622] For generation of data depicted in FIGS. 4A-48, HEK293T cells were transiently transfected with a plasmid encoding human TNFR2 (hTNFR2; hTNFR2_pcDNA3.4.dna). After 48 hours, HEK293T cells were harvested and incubated with 1 μM purified His-tagged (myc-his tag) VHHs, including a control VHH against an irrelevant antigen. VHH binding was then detected using an Alexa488-labeled anti-His tag antibody and measured by flow cytometry (iQue).

[0623] For generation of data depicted in FIGS. 5A-5B HEK293T cells were transiently transfected with a plasmid encoding human TNFR2 (hTNFR2; hTNFR2_pcDNA3.4.dna), After 48 hours, HEK293T cells were harvested and incubated with 100 nM purified His-tagged (myc-his tag) VHHs, including a control VHH against an irrelevant antigen. VHH binding was then detected using an Alexa488-labeled anti-His tag antibody and measured by flow cytometry (iQue).

[0624] For generation of data depicted in FIGS. 6A-68, HEK293T cells were transiently transfected with a plasmid encoding cynomolgus TNFR2 (cTNFR2; cTNFR2_pcDNA3.4.dna) or mouse TNFR2 (mTNFR2; mTNFR2_pcDNA3.4.dna). After 48 hours, HEK293T cells were harvested and incubated with 100 nM purified His-tagged (myc-his tag) VHHs, including a control VHH against an irrelevant antigen. VHHs binding was then detected using a Alexa488-labeled anti-His tag antibody and measured by flow cytometry (IQue).

[0625] FIG. 7 shows testing of human TNFR2 V-body binding across a range of concentrations for ODY-31D6, ODY-35A10, ODY-31G3, ODY-31G11, ODY-33D4, ODY-37C7, and. V-bodies were tested at the following molar concentrations: 100 nM, 50 nM, 12.5 nM, 6.25 nM, 3.12 nM, and 1.55 nM. For generation of data depicted in FIG. 7, HEK293T cells were transiently transfected with a plasmid encoding human TNFR2 (hTNFR2; hTNFR2_pcDNA3.4.dna). After 48 hours, HEK293T cells were harvested and incubated with increasing molar concentrations of purified His-tagged (myc-his tag) VHHs, including a control VHH against an irrelevant antigen. VHH binding was then detected using an Alexa488-labeled anti-His tag antibody and measured by flow cytometry (iQue). The bar histogram (FIG. 7) shows the percentage of Alexa488 positive cells for ODY-31D6, ODY-35A10, ODY-31G3, ODY-31G11, ODY-33D4, ODY-37C7.

### Example 5. Surface Plasmon Resonance Binding Affinities

[0626] Binding affinities of the V-bodies to their respective target was determined by surface plasmon resonance (SPR) using a Caterra LSA instrument. A schematic diagram depicting the experimental setup of the present Example is shown in FIG. 8. Affinity purified V-bodies were covalently crosslinked onto an LSA HC200M chip using EDC/Sulfo NHS. The interaction with human, cynomolgus, and mouse TNFR2 (extracellular domain) (V-body coupling concentration: human, 1 M; cynomolgus/mouse, 4 μM) was measured under physiological conditions (Running Buffer: HBST-50 mM HEPES pH 7.4, 150 mM NaCl, 0.1% (w/v) BSA, 0.05% (v/v) Tween20, 25° C.) using eight different antigen concentrations (3-fold serial dilutions, start at 200 nM). Resulting sensorgrams (FIGS. 9A-9F) were analyzed and equilibrium-binding affinities (K_{D}s) were calculated using Carterra's data analysis software. FIG. 10 shows a summary of binding affinities of 16 anti-TNFR2 V-bodies: 31D6, 31G11, 31G3, 33D4, 35A10, and 37C7. Seven of the 16 V-body candidates tested (31D6, 31G11, 31G3, 33D4, 35A10, and 37C7) were shown to bind human TNFR2 with 1-2-digit nM affinity. Nine and zero V-bodies demonstrated cross-reactivity to cynomolgus TNFR2 (96% identical to hTNFR2 sequence) and mouse TNFR2 (63% identical to hTNFR2 sequence), respectively.

### Example 6. MR2-1 Competition

[0627] To investigate whether humanized TNFR2 V-bodies targeted the epitope recognized by a MR2-1 bivalent agonist, TNFR2 expressing HEK cells (clone 25) were incubated with or without MR2-1 (5 or 10 μg/ml) prior to (pre-) and/or during (co-) incubation with His-tagged TNFR2-specific V-bodies. After washing, V-body binding was detected by labelled anti-His antibody. Binding inhibition in the presence of MR2-1 indicated binding of TNFR2 V-bodies and MR2-1 bivalent agonist to an overlapping epitope. Specifically, N1365hu1 and N1409hu1 may recognize the same epitope as MR2-1. MR2-1 binding enhanced binding of N1402hu1, N1425hu1 and N1277hu1 to TNFR2 (FIG. 11).

### Example 7. TNFR2 Reporter Assay

[0628] HEK293 nuclear factor kappa B (NF-κB) reporter (Luc) cells stably expressing TNFR2 were established by transfection and antibiotic selection. Several clones were derived from the cell pool. In these cells, TNFR2 signaling was measured by NF-κB-induced expression of firefly luciferase (Luc). Data showing agonism of multivalent constructs characterized on NF-κB reporter HEK293 cells stably expressing TNFR2 are displayed in FIGS. 12A-12D. Typically, luciferase activity was measured 16- to 24-hours after incubation with the V-bodies. For assay control experiments, commercially available human TNFR2 agonist MR2-1 monoclonal antibodies were tested on NF-κB reporter (Luc) HEK293 reporter cell-line stably expressing TNFR2 (clone 25) versus parental cell line (PCL) (FIG. 13). For the sample analysis (n=1), 2 μL of purified sample (43 mM Citrate 148 mM HEPES, pH 6) was diluted using 10-fold serial dilutions (1:10) in assay medium. A bar graph showing protein concentration (mg/ml) for the V-body constructs and respective controls (see FIG. 14A, for sample details) is shown in FIG. 14B. A bar graph showing relative luciferase units (RLUs) for V-body constructs and respective controls (see FIG. 14A, for sample details) tested on a PCL control is shown in FIG. 14C. Concentration range curve data generated using MR2-1 (Hycult) and TNFα controls revealed increasing RLU measured with increasing concentrations of MR2-1 (mol/L) and TNFα (ng/ml) (FIGS. 15A-15B, respectively). FIGS. 16A-16C show dot plots of RLU measured across increasing concentrations (mol/L) of control (control 12) and tetravalent V-body fusion constructs comprising four V-bodies mounted onto an Fc of a IgG4 variant comprising S228P and L235E mutations. FIGS. 17A-17F show dot plots of RLU measured across increasing concentrations (mol/L) of control (control 10) and tetravalent V-body fusion constructs comprising four V-bodies mounted onto an Fc of a IgG4 variant comprising $228P and L235E mutations, FIGS. 18A-18C show dot plots of RLU measured across increasing concentrations (mol/L) of control (control 10) and tetravalent V-body fusion constructs comprising four V-bodies mounted onto an Fc of a IgG4 variant comprising S228P and L235E mutations. FIGS. 19A-19C show exemplary dot plots of RLUs measured across increasing concentrations (mol/L) of control (control 13) and IL-2N88D V-body fusion constructs. Limit of detection, LOD. A comparison of RLU measured across increasing concentrations (mol/L) of monospecific constructs 10 and 12 tested on NF-κB reporter (Luc) HEK293 reporter cell-line stably expressing TNFR2 (clone 8) is shown in FIG. 20.

### Example 8. Testing of TNFR2 Agonism by Multivalent Constructs

[0629] The ability of multivalent constructs to agonize TNFR2 on human regulatory T cells (Tregs) was demonstrated by the upregulation of Human Leukocyte Antigen, DR isotype (HLA-DR) and chemokine motif (C-C motif) receptor 8 (CCR8) upon activation of TNFR2, HLA-DR and CCR8 are markers expressed on highly suppressive Tregs, which have been shown to be upregulated by TNFR2 agonist MR2-1. A description of established Treg markers (e.g., forkhead box P3 (FoxP3), HLA-DR, CCR8, and OX-40) useful in, e.g., screening of multivalent constructs in first wave binders on primary cells, is described in Table 6.

TABLE 6
Treg Markers for Screening Multivalent Constructs

| Marker | Exemplary biological function(s) |
|---|---|
| FoxP3 | Treg marker |
| HLA- | Expressed on a functionally distinct population of Tregs |
| DR | associated with high FoxP3 expression and high |
| | suppression of effector T-cells |
| | Has been shown to be upregulated by TNFR2 agonist |
| CCR8 | Chemokine receptor expressed on Treg cells, a subset of Type |
| | 2 T helper (Th-2) cells, monocytic cells and natural killer (NK) |
| | cells |
| | High levels of CCR8 mark cells with high levels of suppressive |
| | function |
| OX-40 | T-cell activity marker expressed on Treg cells |

[0630] For testing of multivalent constructs in Tregs, human Tregs were isolated from buffy coats using magnetic beads, and subsequently stimulated with anti-CD3 and anti-CD28 coated stimulation beads with IL-2, in the presence or absence of fixed or increasing concentrations of a control VHH or TNFR2-specific V-bodies.

[0631] An exemplary experimental timeline of TNFR2 stimulation by multivalent constructs on primary human peripheral blood mononuclear cells (PBMCs) and CD4⁺ CD25⁺ CD127dim Tregs is shown in FIG. 21. Briefly, on Day 0, PBMCs were isolated and selected from three donors (Donors 1-3). Tregs were positively selected for CD4⁺ CD25⁺ CD127dim (Mitlenyi Cat. No. 130-094-775). Fluorescence-activated cell sorting (FACS) analysis was used in cell quality control (QC) experiments to confirm cell populations based on CD4, CD25, CD127, FoxP3, and TNFR2 markers. For the assay set-up, a 96-well plate was seeded with 2×10⁴ cells/well CD4+ C25+ CD127dim Tregs or PBMCs (200 μl total culture volume). Cells were activated with anti-CD3/anti-CD28 coated stimulation beads (using a ratio of 1:2 for beads:cells) and IL-2 (5 IU/mL). Multivalent constructs and controls were added to each well at a 1:100 dilution. Controls were multivalent control V-body fusion constructs, IL-2 N88D fusion constructs, and TNFR2 agonist MR2-1. On Day 6, FACS analysis was performed for live/dead quantification of cells and assessment of cell populations based on expression levels and density of CD4, FoxP3, HLA-DR, and/or CCR8 markers. A bar graph of an overview of in-assay concentrations (nM) of multivalent (e.g., tetravalent Fc, Vb-Fc-Vb, rigid bivalent no Fc) binders is shown in FIG. 22. An exemplary gating strategy for Treg markers useful in the practice of the present Example is shown in FIG. 23. Briefly, Treg Donor 1 is shown as an example and an identical strategy was used for Treg Donor 2 and Donor 3. Live cell and CD4 gating were based on Fluorescence Minus One (FMO) control determination of the cut-off point between background fluorescence and positive cell populations. FOXP3, HLA-DR, CCR8, and OX-40 gating was based on the CD4 subset of IgG control-stained sample from the same donor. For FoxP3, the gate was set at approximately 0.2%. For OX-40, HLA-DR and CCR8, the gate was set at approximately 2%.

[0632] Findings from the present Example showed that multivalent anti-TNFR2 constructs increased expression of the Treg suppression marker HLA-DR (FIGS. 24A-B) and CCR8 (FIG. 248). In particular, each of the multivalent formats tested herein resulted in increased HLA-DR and CCR8 expression for specific 37C7 binder compared to control with formats, with 4 binders showing the strongest increase. IL-2 N88D fusion constructs increased HLA-DR expression however a tetravalent anti-TNFR2 V-body formal was required for an additional increase in HLA-DR expression compared to control. Further, tetravalent anti-TNFR2 V-bodies strongly increased expression of Treg suppression marker HLA-DR on Fox P3⁺ Tregs (FIGS. 25A-25B).

[0633] Results additionally revealed anti-TNFR2 V-body fusion construct dose-dependent induction of Treg-suppression marker HLA-DR in FoxP3+ CD4+ Tregs (see, e.g., FIGS. 26-29). Dose-dependent induction of Treg suppression marker HLA-DR expression across various concentrations of tetravalent anti-TNFR2 V-body Fc fusion construct 10 for Donor 1 (top panel) and Donor 2 (bottom panel) are shown in FIG. 27. Tetravalent Fc constructs, irrespective of binder, showed dose-dependent induction of Treg suppression marker HLA-DR expression. Maximal induction of HLA-DR expression was binder dependent. Construct 37C7_10 reached a higher plateau compared to monoclonal TNFR2 agonist MR2-1. Dose-dependent induction of Treg suppression marker HLA-DR expression across various concentrations of rigid bivalent anti-TNFR2 V-body fusion construct 2 for Donor 1 (top panel) and Donor 2 (bottom panel) is shown in FIG. 28. Rigid bivalent constructs at higher concentrations showed modest induction of Treg suppression marker HLA-DR expression with donor dependent differences in maximal expression compared to MR2-1. Dose-dependent induction of Treg suppression marker HLA-DR expression across various concentrations of tetravalent anti-TNFR2 V-body (Vb-Fc-Vb) fusion construct 12 for Donor 1 (top panel) and Donor 2 (bottom panel) is shown in FIG. 29. Vb-Fc-Vb constructs demonstrated dose-dependent induction of Treg suppression marker HLA-DR expression. Maximal induction and potency was dose dependent.

[0634] Amino acid sequences of exemplary fusion protein constructs described in Examples 7 and 8 are provided below. In the sequences, VHH sequences are indicated with a straight underline (e.g., VHH), Fc regions are indicated with bold letters (e.g., higG4-P329G SPLE or higG1 LALAGA), IL-2 N88D sequence is indicated with italic letters (e.g., IL2N88D), linker sequences are indicated with a wavy underline (e.g., Linker), and hinge regions are indicated with both a wavy underline and bold letters (e.g., hinge).

WIL_31D6_2xVHH-Fc
(SEQ ID NO: 3933)
EVQLVESGGGLVQAGGSLRLSCAASGSIVSTNGMGWHROVPGKGRELVAGIRSDGFTNYADSVKGRFTISSDNVKNT

[chemical structure]

LRLSCAASGSIVSTNGMGWHRQVPGKGRELVAGIRSDGFTNYADSVKGRFTISSDNVKNTVYLQMNSLKAEDSGVYFC

[chemical structure]

RTPEVTCVVVDVSQEDPEVQFNWYVDGVEVHNAKTKPREEQFNSTYRVVSVLTVLHQDWLNGKEYKCKVSNKGL
GSSIEKTISKAKGQPREPQVYTLPPSQEEMTKNQVSLTCLVKGFYPSDIAVEWESNGQPENNYKTTPPVLDSDGSFFL
YSRLTVDKSRWQEGNVFSCSVMHEALHNHYTQKSLSLSLGK
WIL_31D6_VHH-Fc-VHH
(SEQ ID NO: 3935)
EVQLVESGGGLVQAGGSLRLSCÅASGSIVSTNGMGWHROVPGKGRELVAGIRSDGFTNYADSVKGRFTISSDNVKNT

[chemical structure]

GGPSVFLFPPKPKDTLMISRTPEVTCVVVDVSQEDPEVQFNWYVDGVEVHNAKTKPREEQFNSTYRVVSVLTVLHQ
DWLNGKEYKCKVSNKGLGSSIEKTISKAKGQPREPQVYTLPPSQEEMTKNQVSLTCLVKGFYPSDIAVEWESNGQPE

[chemical structure]

GGGLVQAGGSLRLSCAASGSIVSTNGMGWHRQVPGKGRELVAGIRSDGFTNYADSVKGRFTISSDNVKNTVYLQMNS
LKAEDSGVYFCYYQALSSPNYGQTFWGQGTQVTVSS
WIL_31D6_IL2N88D-Fc-VHH
(SEQ ID NO: 3937)
APTSSSTKKTQLQLEHLLLDLOMILNGINNYKNPKLTRMLTFKFYMPKKATELKHLQCLEEELKPLEEVLNLAQSKNFHLR

[chemical structure]

PAPEAAGAPSVFLFPPKPKDTLMISRTPEVTCVVVDVSHEDPEVKFNWYVDGVEVHNAKTKPREEQYNSTYRVVSV
LTVLHQDWINGKEYKCKVSNKALPAPIEKTISKAKGQPREPQVYTLPPSREEMTKNQVSLTCLVKGFYPSDIAVEWES

[chemical structure]

QLVESGGGLVOAGGSLRLSCAASGSIVSTNGMGWHROVPGKGRELVAGIRSDGFTNYADSVKGRFTISSDNVKNTVYL
QMNSLKAEDSGVYECYYQALSSPNYGQTFWGQGTQVTVSS
WIL_31D6_VHH-rigid_linker-VHH
(SEQ ID NO: 3938)
EVQLVESGGGLVQAGGSLRLSCAASGSIVSTNGMGWHRQVPGKGRELVAGIRSDGFTNYADSVKGRFTISSDNVKNT

[chemical structure]

SGGGLVQAGGSLRLSCAASGSIVSTNGMGWHRQVPGKGRELVAGIRSDGFTNYADSVKGRFTISSDNVKNTVYLQMN
SLKAEDSGVYFCYYQALSSPNYGQTFWGQGTQVTVSS
WIL_31G11_2xVHH-Fc
(SEQ ID NO: 3939)
EVQLVESGGGLAQPGGSLRLSCAASGFTFSRYAMSWARQAPGKGLEWVSGISDDGSDTYYADSVKGRFTISRDNAKN

[chemical structure]

QPGGSLRLSCAASGFTFSRYAMSWARQAPGKGLEWVSGISDDGSDTYYADSVKGRFTISRDNAKNTVYLQMNSLKPE

[chemical structure]

FPPKPKDTLMISRTPEVTCVVVDVSQEDPEVQFNWYVDGVEVHNAKTKPREEQFNSTYRVVSVLTVLHQDWLNGK
EYKCKVSNKGLGSSIEKTISKAKGQPREPQVYTLPPSQEEMTKNQVSLTCLVKGFYPSDIAVEWESNGQPENNYKTTP
PVLDSDGSFFLYSRLTVDKSRWQEGNVFSCSVMHEALHNHYTQKSLSLSLGK
WIL_31G11_VHH-Fc-VHH
(SEQ ID NO: 3941)
EVQLVESGGGLAQPGGSLRISCAASGFTFSRYAMSWARQAPGKGLEWVSGISDDGSDTYYADSVKGRFTISRDNAKN

[chemical structure]

PAPEFEGGPSVFLFPPKPKDTLMISRTPEVTCVVVDVSQEDPEVQFNWYVDGVEVHNAKTKPREEQFNSTYRVVSV
LTVLHQDWINGKEYKCKVSNKGLGSSIEKTISKAKGQPREPQVYTLPPSQEEMTKNQVSLTCLVKGFYPSDIAVEWE

[chemical structure]

VQLVESGGGLAQPGGSLRLSCAASGFTFSRYAMSWARQAPGKGLEWVSGISDDGSDTYYADSVKGRFTISRDNAKNT
VYLQMNSLKPEDTALYYCAKDAGSWGTGPFGYEYDYWGQGTQVTVSS
WIL_31G11_IL2N88D-Fc-VHH
(SEQ ID NO: 3943)
APTSSSTKKTQLQLEHLLLDLOMILNGINNYKNPKLTRMLTFKFYMPKKATELKHLQCLEEELKPLEEVILNLAQSKNFHLR
PRDLISDINVIVLELKGSETTFMCEYADETATIVEFLNRWITFCQSIISTLTGGGGSGGGGGGGGSGGGGSDKTHTCPPC
PAPEAAGAPSVFLFPPKPKDTLMISRTPEVTCVVVDVSHEDPEVKFNWYVDGVEVHNAKTKPREEQYNSTYRVVSV
LTVLHQDWLNGKEYKCKVSNKALPAPIEKTISKAKGQPREPQVYTLPPSREEMTKNQVSLTCLVKGFYPSDIAVEWES

[chemical structure]

QLVESGGGLAQPGGSLRLSCAASGFTFSRYAMSWARQAPGKGLEWVSGISDDGSDTYYADSVKGRFTISRDNAKNTV
YLQMNSLKPEDTALYCAKDAGSWGTGPFGYEYDYWGQGTQVTVSS
WIL_31G11_VHH-rigid_linker-VHH
(SEQ ID NO: 3944)
EVQLVESGGGLAQPGGSLRLSCAASGFTFSRYAMSWARQAPGKGLEWVSGISDDGSDTYYADSVKGRFTISRDNAKN

[chemical structure]

[chemical structure]

TVYLQMNSLKPEDTALYYCAKDAGSWGTGPFGYEYDYWGQGTQVTVSS
WIL_31G3_2xVHH-Fc
(SEQ ID NO: 3945)
EVQLVESGGGLVOAGGSLRVSCAASGSIFRADAMGWHROVPGKPREFVAGIRSDGFTNYAEAVKGRETISWDTVKNT
VYLQMNSLKPEDTAVYTCYYQSLSSPNYGQVFWGQGTQVTVSSGGGGGGGGGGGGSEVALVESGGGLVQAGGS
LRVSCAASGSIFRADAMGWHRQVPGKPREFVAGIRSDGFTNYAEAVKGRFTISWDTVKNTVYLQMNSLKPEDTAVYT

[chemical structure]

SRTPEVTCVVVDVSQEDPEVQFNWYVDGVEVHNAKTKPREEQFNSTYRVVSVLTVLHQDWLNGKEYKCKVSNKGL
GSSIEKTISKAKGQPREPQVYTLPPSQEEMTKNQVSLTCLVKGFYPSDIAVEWESNGQPENNYKTTPPVLDSDGSFFL
YSRLTVDKSRWQEGNVFSCSVMHEALHNHYTQKSLSLSLGK
WIL_31G3_VHH-Fc-VHH
(SEQ ID NO: 3947)
EVQLVESGGGLVQAGGSLRVSCAASGSIFRADAMGWHRQVPGKPREFVAGIRSDGFTNYAEAVKGRFTISWDTVKNT

[chemical structure]

GGPSVFLFPPKPKDTLMISRTPEVTCVVVDVSQEDPEVQFNWYVDGVEVHNAKTKPREEQFNSTYRVVSVLTVLHQ
DWLNGKEYKCKVSNKGLGSSIEKTISKAKGQPREPQVYTLPPSQEEMTKNQVSLTCLVKGFYPSDIAVEWESNGQPE

[chemical structure]

GGGLVQAGGSLRVSCAASGSIFRADAMGWHROVPGKPREFVAGIRSDGFTNYAEAVKGRFTISWDTVKNTVYLQMN
SLKPEDTAVYTCYYQSLSSPNYGQVFWGOGTQVTVSS
WIL_31G3_IL2N88D-Fc-VHH
(SEQ ID NO: 3949)
APTSSSTKKTQLQLEHLLLDLQMILNGINNYKNPKLTRMLTFKFYMPKKATELKHLQCLEEELKPLEEVLNLAQSKNFHLR

[chemical structure]

PAPEAAGAPSVFLFPPKPKDTLMISRTPEVTCVVVDVSHEDPEVKFNWYVDGVEVHNAKTKPREEQYNSTYRVVSV
LTVLHQDWLNGKEYKCKVSNKALPAPIEKTISKAKGQPREPQVYTLPPSREEMTKNQVSLTCLVKGFYPSDIAVEWES

[chemical structure]

QLVESGGGLVQAGGSLRVSCAASGSIFRADAMGWHRQVPGKPREFVAGIRSDGFTNYAEAVKGRFTISWDTVKNTVY
LQMNSLKPEDTAVYTCYYQSLSSPNYGOVFWGQGTQVTVSS
WIL_31G3_VHH-rigid_linker-VHH
(SEQ ID NO: 3950)
EVQLVESGGGLVQAGGSLRVSCAASGSIFRADAMGWHROVPGKPREFVAGIRSDGETNYAEAVKGRETISWDTVKNT

[chemical structure]

SGGGLVQAGGSLRVSCAASGSIFRADAMGWHRQVPGKPREFVAGIRSDGFTNYAEAVKGRFTISWDTVKNTVYLQM
NSLKPEDTAVYTCYYQSLSSPNYGOVEWGQGTQVTVSS
WIL_33D4_2xVHH-Fc
(SEQ ID NO: 3951)
EVQLVESGGGLVQAGGSLRLSCAASGRTFSDYGMGWFRQAPGKDSEFVAAINWSNGRTNYADSVKGRFTISRDNAK

[chemical structure]

RLSCAASGRTFSDYGMGWFRQAPGKDSEFVAAINWSNGRTNYADSVKGRFTISRDNAKNTGYLEMNSLKVEDTAVYY

[chemical structure]

PEVTCVVVDVSQEDPEVQFNWYVDGVEVHNAKTKPREEQFNSTYRVVSVLTVLHQDWLNGKEYKCKVSNKGLGSS
IEKTISKAKGQPREPQVYTLPPSQEEMTKNQVSLTCLVKGFYPSDIAVEWESNGQPENNYKTTPPVLDSDGSFFLYSR
LTVDKSRWQEGNVFSCSVMHEALHNHYTQKSLSLSLGK
WIL_33D4_VHH-Fc-VHH
(SEQ ID NO: 3953)
EVQLVESGGGLVQAGGSLRLSCAASGRTFSDYGMGWFRQAPGKDSEFVAAINWSNGRTNYADSVKGRFTISRDNAK

[chemical structure]

GPSVFLFPPKPKDTLMISRTPEVTCVVVDVSQEDPEVQFNWYVDGVEVHNAKTKPREEQFNSTYRVVSVLTVLHQD
WLNGKEYKCKVSNKGLGSSIEKTISKAKGQPREPQVYTLPPSQEEMTKNQVSLTCLVKGFYPSDIAVEWESNGQPEN

[chemical structure]

GGLVQAGGSLRLSCAASGRTFSDYGMGWFRQAPGKDSEFVAAINWSNGRTNYADSVKGRFTISRDNAKNTGYLEMN
SLKVEDTAVYYCAATPSGKAYSYWGQGTQVTVSS
WIL_33D4_IL2N88D-Fc-VHH
(SEQ ID NO: 3955)
APTSSSTKKTQLQLEHLLLDLQMILNGINNYKNPKLTRMLTFKFYMPKKATELKHLQCLEEELKPLEEVLNLAQSKNFHLR

[chemical structure]

PAPEAAGAPSVFLFPPKPKDTLMISRTPEVTCVVVDVSHEDPEVKFNWYVDGVEVHNAKTKPREEQYNSTYRVVSV
LTVLHQDWINGKEYKCKVSNKALPAPIEKTISKAKGQPREPQVYTLPPSREEMTKNQVSLTCLVKGFYPSDIAVEWES

[chemical structure]

QLVESGGGLVQAGGSLRLSCAASGRTESDYGMGWFRQAPGKDSEFVAAINWSNGRTNYADSVKGRFTISRDNAKNT
GYLEMNSLKVEDTAVYYCAATPSGKAYSYWGQGTQVTVSS
WIL_33D4_VHH-rigid_linker-VHH
(SEQ ID NO: 3956)
EVQLVESGGGLVQAGGSLRLSCAASGRTFSDYGMGWFRQAPGKDSEFVAAINWSNGRTNYADSVKGRFTISRDNAK

[chemical structure]

GGGLVOAGGSLRLSCAASGRTFSDYGMGWFRQAPGKDSEFVAAINWSNGRTNYADSVKGRFTISRDNAKNTGYLEM
NSLKVEDTAVYYCAATPSGKAYSYWGOGTQVTVSS
WIL_35A10_VHH-Fc-VHH
(SEQ ID NO: 3957)
EVQLVESGGGLVEAGGSLRLSCAASGRTFGSYTMGWFRQAPGREQEFLASIRRTGGSTSYADSVKGRFTISRDNAKKAV

[chemical structure]

VFLFPPKPKDTLMISRTPEVTCVVVDVSQEDPEVQFNWYVDGVEVHNAKTKPREEQFNSTYRVVSVLTVLHQDWL
NGKEYKCKVSNKGLGSSIEKTISKAKGQPREPQVYTLPPSQEEMTKNQVSLTCLVKGFYPSDIAVEWESNGQPENNY

[chemical structure]

LVEAGGSLRLSCAASGRTFGSYTMGWFRQAPGREQEFLASIRRTGGSTSYADSVKGRFTISRDNAKKAVYLQMNSLKPE
DTAVYYCAAAPTGRAFTYWGQGTQVTVSS
WIL_37C7_2xVHH-Fc
(SEQ ID NO: 3959)
EVQLVESGGGLVQPGGSLRLSCAASGFTFDDIAMTWVRQAPGKGLEWVSSIYSYGPNTYYADSVKGRFTISTDSAKNTL

[chemical structure]

SLRLSCAASGFTFDDIAMTWVRQAPGKGLEWVSSIYSYGPNTYYADSVKGRFTISTDSAKNTLYLQMNSLKPEDTAVYY

[chemical structure]

LMISRTPEVTCVVVDVSQEDPEVQFNWYVDGVEVHNAKTKPREEQFNSTYRVVSVLTVLHQDWLNGKEYKCKVSN
KGLGSSIEKTISKAKGQPREPQVYTLPPSQEEMTKNQVSLTCLVKGFYPSDIAVEWESNGQPENNYKTTPPVLDSDGS
FFLYSRLTVDKSRWQEGNVFSCSVMHEALHNHYTQKSLSLSLGK
WIL_37C7_VHH-Fc-VHH
(SEQ ID NO: 3961)
EVQLVESGGGLVQPGGSLRLSCAASGFTFDDIAMTWVRQAPGKGLEWVSSIYSYGPNTYYADSVKGRFTISTDSAKNTL

[chemical structure]

EGGPSVFLFPPKPKDTLMISRTPEVTCVVVDVSQEDPEVQFNWYVDGVEVHNAKTKPREEQFNSTYRVVSVLTVLH
QDWINGKEYKCKVSNKGLGSSIEKTISKAKGQPREPQVYTLPPSQEEMTKNQVSLTCLVKGFYPSDIAVEWESNGQP

[chemical structure]

SGGGLVQPGGSLRLSCAASGFTFDDIAMTWVRQAPGKGLEWVSSIYSYGPNTYYADSVKGRFTISTDSAKNTLYLQMN
SLKPEDTAVYYCAADSDLSTVVVGPHDYWGQGTOVTVSS
WIL_37C7_IL2N88D-Fc-VHH
(SEQ ID NO: 3963)
APTSSSTKKTQLQLEHLLLDLQMILNGINNYKNPKLTRMLTFKFYMPKKATELKHLQCLEEELKPLEEVLNLAQSKNFHLR

[chemical structure]

PAPEAAGAPSVFLFPPKPKDTLMISRTPEVTCVVVDVSHEDPEVKFNWYVDGVEVHNAKTKPREEQYNSTYRVVSV
LTVLHQDWLNGKEYKCKVSNKALPAPIEKTISKAKGQPREPQVYTLPPSREEMTKNQVSLTCLVKGFYPSDIAVEWES

[chemical structure]

QLVESGGGLVOPGGSLRLSCAASGFTFDDIAMTWVRQAPGKGLEWVSSIYSYGPNTYYADSVKGRFTISTDSAKNTLYL
QMNSLKPEDTAVYYCAADSDLSTVVVGPHDYWGQGTQVTVSS
WIL_37C7_VHH-rigid_linker-VHH
(SEQ ID NO: 3964)
EVQLVESGGGLVQPGGSLRLSCAASGFTEDDIAMTWVRQAPGKGLEWVSSIYSYGPNTYYADSVKGRFTISTDSAKNTL

[chemical structure]

ESGGGLVOPGGSLRLSCAASGETEDDIAMTWVRQAPGKGLEWVSSIYSYGPNTYYADSVKGRETISTDSAKNTLYLQM
NSLKPEDTAVYYCAADSDLSTVVVGPHDYWGQGTQVTVSS

### Example 9. TNFR2 Agonism by Tetravalent VHH-Fc Fusion Increases Suppressive Function and Stabilizes the Phenotype of Treg by Preventing Effector Differentiation In Vitro

[0635] TNFR2 agonism induces Treg proliferation and activation. It was hypothesized that TNFR2 stimulation will also increase Treg stability based on the phenotype of TNFR2 knockout mice in which Treg are unstable and convert into effector cells. To test this hypothesis, multivalent anti-TNFR2 VHH proteins with agonist activity on TNFR2 were assessed for their impact on Treg proliferation, activation, immune suppressive function, and stability compared to IL-2 muteins.

[0636] Human naïve Treg treated with anti-TNFR2 VHH or IL-2 mutein were evaluated to detect effects on proliferation, activation, suppressive function, and stability in inflammatory conditions, Specifically, tetravalent-Fc agonists (WIL_33D4_2×VHH-Fc and WIL_37C7_2×VHH-Fc) were characterized in vitro for their ability to expand and activate Treg in the presence of anti-CD3 and IL-2 stimulation. The stability of human naïve Treg (CD4+CD25+CD45RA+) sorted from healthy donor PBMC by magnetic beads was investigated upon stimulation with tetravalent VHH for 5 days followed by 11 to 12 days of inflammatory cytokine challenge (IL-21, IL-23, IL-1b+/−TGFb) and IL-17A or IFNγ intracellular staining after PMA/ionomycin restimulation. Suppressive function was measured by assessing Treg ability to inhibit the proliferation of naïve CD4 responder cells. Similarly, the effect of TNFR2 agonist ODY-520 on proinflammatory cytokine production was evaluated from human PBMC treated with 5 nM TNFR2 V-body or CD28 agonist for 5 days in the presence of anti-CD3. Treg proliferation was measured by assessing percent of proliferating Treg (CD4+FOXP3+) by cell tracer dilution by flow cytometry and cytokine production was measured in the supernatant by homogeneous time resolved fluorescence (HTRF) assay (FIGS. 44A and 44B),

[0637] FIGS. 31 and 33A-33B show that tetravalent TNFR2 VHH-Fc antibodies induced the expansion of naive human Treg and up-regulated biomarkers of enhanced immunosuppressive activity such as CCR8 and HLA-DR and stability marker EZH2. In line with these results, activation of TNFR2 increased the ability of naïve human Treg to suppress the proliferation of CD4 responder cells (FIG. 35), Furthermore, stimulation of naïve human Treg with VHH-Fc prevented the loss of FOXP3 and their differentiation into IL-17A- or IFNγ-secreting cells when cultivated in the presence of inflammatory cytokines (FIGS. 32A, 32B and 34A-34C). TNFR2 agonist expanded Treg (CD4+FOXP3+) without inducing proinflammatory cytokines compared to CD28 agonist. (FIG. 44).

[0638] Agonistic TNFR2 VHH induced the expansion of naïve human Treg, increased the expression of activation markers and stimulated suppressive effects against CD4+ T effector cells. TNFR2 VHH constructs, but not IL-2 muteins, increased human Treg stability in the presence of proinflammatory cytokines based on sustained presence of FOXP3 bright cells and prevention of conversion of Treg into IL-17A- or IFNγ-secreting cells. These data demonstrate that agonism of TNFR2 by a tetravalent VHH-Fc fusion antibody expands human Treg, increases their suppressive function and stabilize their phenotype under inflammatory conditions in vitro.

### Example 10. TNFR2 Agonism by Tetravalent VHH-Fc Fusion and Expands and Activates Treg Cell In Vivo

[0639] The effects of anti-TNFR2 VHH agonists on spleen lymphocyte population in human TNFR2 knock-in mice were assessed by flow cytometry 5 days after a single intravenous injection (2.5 mg/kg) of tetravalent VHH-Fc antibody WIL_33D4_2×VHH-Fc, or control VHH, or mAb into human TNFR2 knock-in mice.

[0640] Upon injection in human TNFR2 knock-in mice, tetravalent VHH-Fc antibody WIL 33D4_2×VHH-Fc led to a 3-fold increase in the percentage of FOXP3+ cell among CD4+ cells in the spleen, while no increase of CD4+FOXP3− and CD8+FOXP3− conventional T cells and only a minor impact on overall splenic immune cell composition was observed (FIGS. 36 and 38). Treatment led to Treg activation as shown by the upregulation of ICOS and ICAM-1 (FIG. 37). Importantly, injection was well tolerated and did not induce weight loss or changes in systemic levels of inflammatory cytokines (TNF, IL-6, IFNγ, IL-5) but increased serum level of IL-10, a cytokine with demonstrated immune-regulatory functions (FIG. 39). TNFR2 agonists, but not IL-2 muteins, increased human Treg stability in the presence of proinflammatory cytokines based on sustained high expression of FOXP3 and prevention of conversion of Treg into IL-17A or IFNγ-secreting cells (FIGS. 34A-34C).

[0641] These data demonstrated that in vivo, a single injection is safe in mice and leads to Treg expansion and activation. Anti-TNFR2 VHH agonistic proteins are effective at expanding Tregs that have a more stable immunosuppressive capacity and phenotype (preventing pathogenic conversion to Teff) compared to IL-2 muteins and may provide a durable and disease modifying therapy for multiple autoimmune diseases.

### Example 11. Evaluation of Effect of VHH-Fc Fusion on Treg Function In Vivo

[0642] Human TNFR2 knock-in mice were injected with the constructs as indicated in FIGS. 42A-42B at 3 mg/kg intravenously. After 5 days, percentage of Treg (FOXP3+CD4+) among CD45+ cell as well as FOXP3, ICAM-1, ICOS expression (MFI, mean fluorescent intensity) on Treg was measured by flow cytometry. Data as depicted in FIGS. 42A and 428 show Treg expansion in the spleen as well as increased expression of FOXP3, linked to Treg stability and function, and Treg activation shown by up-regulation of ICAM-1 and ICOS. Administration of anti-TNFR2 VHH agonists to mice increased Treg by three-fold in blood and tissues without increasing conventional Teff or NK cells as it induced a higher level of FOXP3 and surface markers (FOXP3, ICAM-1, OX-40, ICOS, and CCR8). The effects of anti-TNFR2 VHH agonists on spleen lymphocyte population or on blood cells (eosinophils) in human TNFR2 knock-in mice were assessed after a single intravenous injection (3 mg/kg) of tetravalent VHH-Fc antibody ODY-520, or control VHH, or IL-2 N88D into human TNFR2 knock-in mice. Similarly, the effect of anti-TNFR2 VHH agonist was assessed on serum cytokines 1 day after the single injection of tetravalent VHH-Fc antibody ODY-520, control VHH or IL-2 N88D. (FIGS. 41A-41E). Further, anti-TNFR2 VHH agonists expand Treg across tissues. (FIGS. 40A-40B).

### Example 12. Evaluation of the Effect of VHH-Fc Fusion on Arthritis In Vivo

[0643] At day 0, human TNFR2 knock-in mice were injected with anti-collagen antibodies as well construct ODY-520 at 3 mg/kg intravenously or control VHH. At day 3, mice were challenged with lipopolysaccharide (LPS). Treg cells were measured at day 6 and at day 7, arthritis score (total number of affected digits) and paw volume were measured. The same experiment was repeated with ODY-781 construct. Data as depicted in FIGS. 43B and 43C show reduction of arthritis, measured by paw volume and arthritis score, in a model of collagen-antibody induced arthritis upon treatment with TNFR2 agonist ODY-520 and ODY-781.

[0644] Amino acid sequences of exemplary fusion protein constructs described in Examples 11 and 12 as well as additional engineered constructs are provided below. In the sequences, VHH sequences are indicated with a straight underline (e.g., VHH), Fc regions are indicated with bold letters (e.g., hIgG4-SPLE or hIgG1 LALAPA), N-terminal modification are indicated with both bold and a straight underline (e.g., N-term modification), C-terminal modification are indicated with both italic and a wavy underline (e.g., C-term modification) linker sequences are indicated with a wavy underline (e.g., Linker), and hinge regions are indicated with both a wavy underline and bold letters (e.g., hinge).

ODY-520
(SEQ ID NO: 4483)
EVQLLESGGGLVQPGGSLRLSCAASGRTFSDYGMGWFRQAPGKDSEFVAAINWSNGRTNYADSVKGRFTISRDNAKN

[chemical structure]

SCAASGRTESDYGMGWFRQAPGKDSEFVAAINWSNGRTNYADSVKGRETISRDNAKNTGYLQMNSLRVEDTAVYYC

[chemical structure]

EDPEVQFNWYVDGVEVHNAKTKPREEQFNSTYRVVSVLTVLHQDWLNGKEYKCKVSNKGLPSSIEKTISKAKGQPR
EPQVYTLPPSQEEMTKNQVSLTCLVKGFYPSDIAVEWESNGQPENNYKTTPPVLDSDGSFFLYSRLTVDKSRWQEG
NVFSCSVMHEALHNHYTQKSLSLSLGK
ODY-552
(SEQ ID NO: 4484)
EVQLLESGGGLVOPGGSLRLSCAASGRTFSDYGMGWFRQAPGKDSEFVAAINWSNGRTNYADSVKGRFTISRDNAKN

[chemical structure]

SCAASGRTFSDYGMGWFRQAPGKDSEFVAAINWSNGRTNYADSVKGRFTISRDNAKNTGYLQMNSLRVEDTAVYYC

[chemical structure]

DPEVKFNWYVDGVEVHNAKTKPREEQYNSTYRVVSVLTVLHQDWLNGKEYKCKVSNKALAAPIEKTISKAKGQPRE
PQVYTLPPSREEMTKNQVSLTCLVKGFYPSDIAVEWESNGQPENNYKTTPPVLDSDGSFFLYSKLTVDKSRWQQGN
VFSCSVMHEALHNHYTQKSLSLSPG
ODY-558
(SEQ ID NO: 4485)
EVQLLESGGGLVQPGGSLRLSCAASGRTFSDYGMGWFRQAPGKDSEFVAAINWSNGRTNYADSVKGRFTISRDNAKN

[chemical structure]

SCAASGRTFSDYGMGWFRQAPGKDSEFVAAINWSNGRTNYADSVKGRFTISRDNAKNTGYLQMNSLRVEDTAVYYC

[chemical structure]

PEVKFNWYVDGVEVHNAKTKPREEQYNSTYRVVSVLTVLHQDWLNGKEYKCKVSNKALAAPIEKTISKAKGQPREP
QVYTLPPSREEMTKNQVSLTCLVKGFYPSDIAVEWESNGQPENNYKTTPPVLDSDGSFFLYSKLTVDKSRWQQGNV
FSCSVMHEALHNHYTQKSLSLSPG
ODY-582
(SEQ ID NO: 4486)
EVQLLESGGGLVQPGGSLRLSCAASGRTFGSYTMGWFRQAPGKEREFLASIRWTGGSTSYADSVKGRFTISRDDAKKT

[chemical structure]

CAASGRTFGSYTMGWFROAPGKEREFLASIRWTGGSTSYADSVKGRFTISRDDAKKTVYLQMNSLRPEDTAVYYCVAS

[chemical structure]

EVQFNWYVDGVEVHNAKTKPREEQFNSTYRVVSVLTVLHQDWLNGKEYKCKVSNKGLPSSIEKTISKAKGQPREPQ
VYTLPPSQEEMTKNQVSLTCLVKGFYPSDIAVEWESNGQPENNYKTTPPVLDSDGSFFLYSRLTVDKSRWQEGNVFS
CSVMHEALHNHYTQKSLSLSLGK
ODY-583
(SEQ ID NO: 4487)
EVQLLESGGGLVQPGGSLRLSCAASGRTFGSYTMGWFRQAPGKEREFLASIRWTGGSTSYADSVKGRFTISRDDAKKT

[chemical structure]

CAASGRTFGSYTMGWFRQAPGKEREFLASIRWTGGSTSYADSVKGRFTISRDDAKKTVYLOMNSLRPEDTAVYYCVAS

[chemical structure]

VKFNWYVDGVEVHNAKTKPREEQYNSTYRVVSVLTVLHQDWINGKEYKCKVSNKALAAPIEKTISKAKGQPREPQ
VYTLPPSREEMTKNQVSLTCLVKGFYPSDIAVEWESNGQPENNYKTTPPVLDSDGSFFLYSKLTVDKSRWQQGNVFS
CSVMHEALHNHYTQKSLSLSPGK
ODY-780
(SEQ ID NO: 4488)
EVQLLESGGGLVQPGGSLRLSCAASGRTFSDYGMGWFRQAPGKDSEFVAAINWSNGKTNYADSVKGRFTISRDNAKN

[chemical structure]

SCAASGRTFSDYGMGWFRQAPGKDSEFVAAINWSNGKTNYADSVKGRFTISRDNAKNTGYLQMNSLRVEDTAVYYC

[chemical structure]

EDPEVQFNWYVDGVEVHNAKTKPREEQFNSTYRVVSVLTVLHQDWLNGKEYKCKVSNKGLPSSIEKTISKAKGQPR
EPQVYTLPPSQEEMTKNQVSLTCLVKGFYPSDIAVEWESNGQPENNYKTTPPVLDSDGSFFLYSRLTVDKSRWQEG
NVFSCSVMHEALHNHYTQKSLSLSLGK
ODY-781
(SEQ ID NO:4489)
EVQLLESGGGLVQPGGSLRLSCAASGETEDDIAMTWVRQAPGKGLEWVSSIYSYGPNTYYADSVKGRETISTDSAKNTL

[chemical structure]

SLRLSCAASGETEDDIAMTWVROAPGKGLEWVSSIYSYGPNTYYADSVKGRETISTDSAKNTLYLOMNSLRPEDTAVYY

[chemical structure]

VVDVSQEDPEVQFNWYVDGVEVHNAKTKPREEQFNSTYRVVSVLTVLHQDWLNGKEYKCKVSNKGLPSSIEKTISK
AKGQPREPQVYTLPPSQEEMTKNQVSLTCLVKGFYPSDIAVEWESNGQPENNYKTTPPVLDSDGSFFLYSRLTVDKS
RWQEGNVFSCSVMHEALHNHYTQKSLSISLGK
ODY-794
(SEQ ID NO:4490)
EVQLLESGGGLVQPGGSLRLSCAASGRTESDYGMGWFRQAPGKDSEFVAAINWSNARTNYADSVKGRFTISRDNAKN

[chemical structure]

SCAASGRTFSDYGMGWFRQAPGKDSEFVAAINWSNARTNYADSVKGRFTISRDNAKNTGYLQMNSLRVEDTAVYYC

[chemical structure]

EDPEVQFNWYVDGVEVHNAKTKPREEQFNSTYRVVSVLTVLHQDWLNGKEYKCKVSNKGLPSSIEKTISKAKGQPR
EPQVYTLPPSQEEMTKNQVSLTCLVKGFYPSDIAVEWESNGQPENNYKTTPPVLDSDGSFFLYSRLTVDKSRWQEG
NVFSCSVMHEALHNHYTQKSLSLSLGK
ODY-840
(SEQ ID NO: 4491)
EVQLLESGGGLVQPGGSLRLSCAASGRTESDYGMGWFRQAPGKDSEFVAAINWSNARTNYADSVKGRFTISRDNAKN

[chemical structure]

LSCAASGRTESDYGMGWFRQAPGKDSEFVAAINWSNARTNYADSVKGRFTISRDNAKNTGYLQMNSLRVEDTAVYY

[chemical structure]

QEDPEVQFNWYVDGVEVHNAKTKPREEQFNSTYRVVSVLTVLHQDWLNGKEYKCKVSNKGLPSSIEKTISKAKGQP
REPQVYTLPPSQEEMTKNQVSLTCLVKGFYPSDIAVEWESNGQPENNYKTTPPVLDSDGSFFLYSRLTVDKSRWQEG
NVFSCSVMHEALHNHYTQKSLSLSLGK
ODY-906
(SEQ ID NO: 4492)
EVQLLESGGGLVQPGGSLRLSCAASGRTFSDYGMGWFRQAPGKDSEFVAAINWSNARTNYADSVKGRFTISRDNAKN

[chemical structure]

LSCAASGRTFSDYGMGWFRQAPGKDSEFVAAINWSNARTNYADSVKGRFTISRDNAKNTGYLQMNSLRVEDTAVYY

[chemical structure]

EDPEVKFNWYVDGVEVHNAKTKPREEQYNSTYRVVSVLTVLHQDWLNGKEYKCKVSNKALAAPIEKTISKAKGQPR
EPQVYTLPPSREEMTKNQVSLTCLVKGFYPSDIAVEWESNGQPENNYKTTPPVLDSDGSFFLYSKLTVDKSRWQQG
NVFSCSVMHEALHNHYTQKSLSLSPGK
ODY-910
(SEQ ID NO: 4493)
DVQLLESGGGLVQPGGSLRLSCAASGRTFGSYTMGWFRQAPGKEREFLASIRWTGGSTSYADSVKGRETISRDDAKKT

[chemical structure]

SCAASGRTFGSYTMGWFRQAPGKEREFLASIRWTGGSTSYADSVKGRFTISRDDAKKTVYLQMNSLRPEDTAVYYCVA

[chemical structure]

EVKFNWYVDGVEVHNAKTKPREEQYNSTYRVVSVLTVLHQDWLNGKEYKCKVSNKALAAPIEKTISKAKGQPREPQ
VYTLPPSREEMTKNQVSLTCLVKGFYPSDIAVEWESNGQPENNYKTTPPVLDSDGSFFLYSKLTVDKSRWQQGNVFS
CSVMHEALHNHYTQKSLSLSPGK
ODY-939
(SEQ ID NO: 4494)
DVQLLESGGGLVQPGGSLRLSCAASGRTFGSYTMGWFRQAPGKEREFLASIRWTGGSTSYADSVKGRETISRDDAKKT

[chemical structure]

SCAASGRTFGSYTMGWFRQAPGKEREFLASIRWTGGSTSYADSVKGRFTISRDDAKKTVYLOMNSLRPEDTAVYYCVA

[chemical structure]

PEVQFNWYVDGVEVHNAKTKPREEQFNSTYRVVSVLTVLHQDWINGKEYKCKVSNKGLPSSIEKTISKAKGQPREP
QVYTLPPSQEEMTKNQVSLTCLVKGFYPSDIAVEWESNGQPENNYKTTPPVLDSDGSFFLYSRLTVDKSRWQEGNV
FSCSVMHEALHNHYTQKSLSLSLGK
ODY-941
(SEQ ID NO: 4686)
DVQLVESGGGLVQPGGSLRLSCAASGSIFRFPPMGWYRQAPGKQREQVAQLTSGGSTNYADSVKGRFTISRDNAKNT

[chemical structure]

CAASGSIFRFPPMGWYRQAPGKQREQVAQLTSGGSTNYADSVKGRFTISRDNAKNTWYLQMNSLRPEDTAVYYCSVL

[chemical structure]

KFNWYVDGVEVHNAKTKPREEQYNSTYRVVSVLTVLHQDWLNGKEYKCKVSNKALAAPIEKTISKAKGQPREPQVY
TLPPSREEMTKNQVSLTCLVKGFYPSDIAVEWESNGQPENNYKTTPPVLDSDGSFFLYSKLTVDKSRWQQGNVFSCS
VMHEALHNHYTQKSLSLSPGK
ODY-942
(SEQ ID NO: 4687)
DVQLVESGGGLVQPGGSLRLSCAASGSIFRFPPMGWYRQAPGKQREQVAQLTSGGSTNYADSVKGRFTISRDNAKNT

[chemical structure]

SCAASGSIFRFPPMGWYRQAPGKQREQVAQLTSGGSTNYADSVKGRFTISRDNAKNTWYLQMNSLRPEDTAVYYCSV

[chemical structure]

VKFNWYVDGVEVHNAKTKPREEQYNSTYRVVSVLTVLHQDWLNGKEYKCKVSNKALAAPIEKTISKAKGQPREPQ
VYTLPPSREEMTKNQVSLTCLVKGFYPSDIAVEWESNGQPENNYKTTPPVLDSDGSFFLYSKLTVDKSRWQQGNVFS
CSVMHEALHNHYTQKSLSLSPGK
ODY-943
(SEQ ID NO: 4688)
DVQLVESGGGLVQPGGSLRLSCAASGSIFRFPPMGWYRQAPGKQREQVAQLTSGGSTNYADSVKGRFTISRDNAKNT

[chemical structure]

CAASGSIFRFPPMGWYRQAPGKQREQVAQLTSGGSTNYADSVKGRFTISRDNAKNTWYLQMNSLRPEDTAVYYCSVL

[chemical structure]

KFNWYVDGVEVHNAKTKPREEQYNSTYRVVSVLTVLHQDWLNGKEYKCKVSNKALAAPIEKTISKAKGQPREPQVY
TLPPSREEMTKNQVSLTCLVKGFYPSDIAVEWESNGQPENNYKTTPPVLDSDGSFFLYSKLTVDKSRWQQGNVFSCS
VMHEALHNHYTQKSLSLSPGK
ODY-944
(SEQ ID NO: 4689)
DVQLLESGGGLVQPGGSLRLSCAASGRTFSDYGMGWFROAPGKDSEFVAAINWSNARTNYADSVKGRETISRDNAKN

[chemical structure]

LSCAASGRTESDYGMGWFRQAPGKDSEFVAAINWSNARTNYADSVKGRFTISRDNAKNTGYLOMNSLRVEDTAVYY

[chemical structure]

EDPEVKFNWYVDGVEVHNAKTKPREEQYNSTYRVVSVLTVLHQDWLNGKEYKCKVSNKALAAPIEKTISKAKGQPR
EPQVYTIPPSREEMTKNQVSLTCLVKGFYPSDIAVEWESNGQPENNYKTTPPVLDSDGSFFLYSKLTVDKSRWQQG
NVFSCSVMHEALHNHYTQKSLSLSPGK
ODY-945
(SEQ ID NO: 4690)
DVQLLESGGGLVQPGGSLRLSCAASGRTFSDYGMGWFRQAPGKDSEFVAAINWSNARTNYADSVKGRFTISRDNAKN

[chemical structure]

LSCAASGRTFSDYGMGWFRQAPGKDSEFVAAINWSNARTNYADSVKGRFTISRDNAKNTGYLQMNSLRVEDTAVYY

[chemical structure]

EDPEVKFNWYVDGVEVHNAKTKPREEQYNSTYRVVSVLTVLHQDWLNGKEYKCKVSNKALAAPIEKTISKAKGQPR
EPQVYTLPPSREEMTKNQVSLTCLVKGFYPSDIAVEWESNGQPENNYKTTPPVLDSDGSFFLYSKLTVDKSRWQQG
NVFSCSVMHEALHNHYTQKSLSLSPGK
ODY-946
(SEQ ID NO: 4691)
DVQLLESGGGLVQPGGSLRLSCAASGRTFSDYGMGWFRQAPGKDSEFVAAINWSNARTNYADSVKGRFTISRDNAKN

[chemical structure]

LSCAASGRTFSDYGMGWFRQAPGKDSEFVAAINWSNARTNYADSVKGRETISRDNAKNTGYLQMNSLRVEDTAVYY

[chemical structure]

EDPEVKFNWYVDGVEVHNAKTKPREEQYNSTYRVVSVLTVLHQDWLNGKEYKCKVSNKALAAPIEKTISKAKGQPR
EPQVYTLPPSREEMTKNQVSLTCLVKGFYPSDIAVEWESNGQPENNYKTTPPVLDSDGSFFLYSKLTVDKSRWQQG
NVFSCSVMHEALHNHYTQKSLSLSPGK
ODY-947
(SEQ ID NO: 4692)
DVQLLESGGGLVOPGGSLRLSCAASGRTESDYGMGWFROAPGKDSEFVAAINWSNARTNYADSVKGRETISRDNAKN

[chemical structure]

LSCAASGRTFSDYGMGWFRQAPGKDSEFVAAINWSNARTNYADSVKGRFTISRDNAKNTGYLQMNSLRVEDTAVYY

[chemical structure]

EDPEVKFNWYVDGVEVHNAKTKPREEQYNSTYRVVSVLTVLHQDWLNGKEYKCKVSNKALAAPIEKTISKAKGQPR
EPQVYTLPPSREEMTKNQVSLTCLVKGFYPSDIAVEWESNGQPENNYKTTPPVLDSDGSFFLYSKLTVDKSRWQQG
NVFSCSVMHEALHNHYTQKSLSLSPGK
ODY-948
(SEQ ID NO: 4693)
DVQLLESGGGLVQPGGSLRLSCAASGRTFSDYGMGWFRQAPGKDSEFVAAINWSNARTNYADSVKGRFTISRDNAKN

[chemical structure]

LSCAASGRTFSDYGMGWFRQAPGKDSEFVAAINWSNARTNYADSVKGRFTISRDNAKNTGYLQMNSLRVEDTAVYY

[chemical structure]

EDPEVKFNWYVDGVEVHNAKTKPREEQYNSTYRVVSVLTVLHQDWLNGKEYKCKVSNKALAAPIEKTISKAKGQPR
EPQVYTLPPSREEMTKNQVSLTCLVKGFYPSDIAVEWESNGQPENNYKTTPPVLDSDGSFFLYSKLTVDKSRWQQG
NVFSCSVMHEALHNHYTQKSLSLSPGK
ODY-949
(SEQ ID NO: 4694)
DVQLLESGGGLVQPGGSLRLSCAASGRTESDYGMGWFRQAPGKDSEFVAAINWSNARTNYADSVKGRETISRDNAKN

[chemical structure]

LSCAASGRTFSDYGMGWFRQAPGKDSEFVAAINWSNARTNYADSVKGRFTISRDNAKNTGYLQMNSLRVEDTAVYY

[chemical structure]

EDPEVKFNWYVDGVEVHNAKTKPREEQYNSTYRVVSVLTVLHQDWLNGKEYKCKVSNKALAAPIEKTISKAKGQPR
EPQVYTLPPSREEMTKNQVSLTCLVKGFYPSDIAVEWESNGQPENNYKTTPPVLDSDGSFFLYSKLTVDKSRWQQG
NVFSCSVMHEALHNHYTQKSLSLSPGK
ODY-950
(SEQ ID NO: 4695)
DVQLLESGGGLVQPGGSLRLSCAASGRTFSDYGMGWFRQAPGKDSEFVAAINWSNARTNYADSVKGRFTISRDNAKN

[chemical structure]

LSCAASGRTFSDYGMGWFRQAPGKDSEFVAAINWSNARTNYADSVKGRFTISRDNAKNTGYLQMNSLRVEDTAVYY

[chemical structure]

EDPEVKFNWYVDGVEVHNAKTKPREEQYNSTYRVVSVLTVLHQDWLNGKEYKCKVSNKALAAPIEKTISKAKGQPR
EPQVYTLPPSREEMTKNQVSLTCLVKGFYPSDIAVEWESNGQPENNYKTTPPVLDSDGSFFLYSKLTVDKSRWQQG
NVFSCSVMHEALHNHYTQKSLSLSPGK
ODY-951
(SEQ ID NO: 4696)
DVQLLESGGGLVQPGGSLRLSCAASGRTESDYGMGWFROAPGKDSEFVAAINWSNARTNYADSVKGRETISRDNAKN

[chemical structure]

LSCAASGRTESDYGMGWFRQAPGKDSEFVAAINWSNARTNYADSVKGRETISRDNAKNTGYLQMNSLRVEDTAVYY

[chemical structure]

EDPEVKFNWYVDGVEVHNAKTKPREEQYNSTYRVVSVLTVLHQDWLNGKEYKCKVSNKALAAPIEKTISKAKGQPR
EPQVYTLPPSREEMTKNQVSLTCLVKGFYPSDIAVEWESNGQPENNYKTTPPVLDSDGSFFLYSKLTVDKSRWQQG
NVFSCSVMHEALHNHYTQKSLSLSPGK
ODY-958
(SEQ ID NO: 4495)
DVQLLESGGGLVQPGGSLRLSCAASGRTFSDYGMGWFRQAPGKDSEFVAAINWSNARTNYADSVKGRFTISRDNAK

[chemical structure]

RLSCAASGRTFSDYGMGWFRQAPGKDSEFVAAINWSNARTNYADSVKGRFTISRDNAKNTGYLQMNSLRVEDTAVY

[chemical structure]

HEDPEVKFNWYVDGVEVHNAKTKPREEQYNSTYRVVSVLTVLHQDWLNGKEYKCKVSNKALAAPIEKTISKAKGQP
REPQVYTLPPSREEMTKNQVSLTCLVKGFYPSDIAVEWESNGQPENNYKTTPPVLDSDGSFFLYSKLTVDKSRWQQ
GNVFSCSVMHEALHNHYTQKSLSLSPGK
ODY-961
(SEQ ID NO: 4496)
DVQLLESGGGLVQPGGSLRLSCAASGRTFSDYGMGWFRQAPGKDSEFVAAINWSNARTNYADSVKGRFTISRDNAK

[chemical structure]

RLSCAASGRTFSDYGMGWFROAPGKDSEFVAAINWSNARTNYADSVKGRFTISRDNAKNTGYLOMNSLRVEDTAVY

[chemical structure]

SQEDPEVQFNWYVDGVEVHNAKTKPREEQFNSTYRVVSVLTVLHQDWLNGKEYKCKVSNKGLPSSIEKTISKAKGQ
PREPQVYTLPPSQEEMTKNQVSLTCLVKGFYPSDIAVEWESNGQPENNYKTTPPVLDSDGSFFLYSRLTVDKSRWQE
GNVFSCSVMHEALHNHYTQKSLSLSLGK
ODY-1094
(SEQ ID NO: 4497)
EVQLLESGGGLVOPGGSLRLSCAASGETEDDIAMTWVRQAPGKGLEWVSSIYSYGPNTYYADSVKGRETISTDSAKNTL

[chemical structure]

SLRLSCAASGFTFDDIAMTWVRQAPGKGLEWVSSIYSYGPNTYYADSVKGRFTISTDSAKNTLYLQMNSLRPEDTAVYY

[chemical structure]

VDVSHEDPEVKFNWYVDGVEVHNAKTKPREEQYNSTYRVVSVLTVLHQDWLNGKEYKCKVSNKALAAPIEKTISKA
KGQPREPQVYTLPPSREEMTKNQVSLTCLVKGFYPSDIAVEWESNGQPENNYKTTPPVLDSDGSFFLYSKLTVDKSR
WQQGNVFSCSVMHEALHNHYTQKSLSLSPGK
ODY-1095
(SEQ ID NO: 4498)
EVQLLESGGGLVQPGGSLRLSCAASGRTFSDYGMGWFRQAPGKDSEFVAAINWSNARTNYADSVKGRFTISRDNAKN

[chemical structure]

SCAASGRTESDYGMGWFRQAPGKDSEFVAAINWSNARTNYADSVKGRETISRDNAKNTGYLOMNSLRVEDTAVYYC

[chemical structure]

DPEVKFNWYVDGVEVHNAKTKPREEQYNSTYRVVSVLTVLHQDWINGKEYKCKVSNKALAAPIEKTISKAKGQPRE
PQVYTLPPSREEMTKNQVSLTCLVKGFYPSDIAVEWESNGQPENNYKTTPPVLDSDGSFFLYSKLTVDKSRWQQGN
VFSCSVMHEALHNHYTQKSLSLSPGK
ODY-1096
(SEQ ID NO: 4499)
DVQLLESGGGLVQPGGSLRLSCAASGRTEGSYTMGWFRQAPGKEREFLASIRWTGGSTSYADSVKGRFTISRDDAKKT

[chemical structure]

CAASGRTEGSYTMGWFRQAPGKEREFLASIRWTGGSTSYADSVKGRFTISRDDAKKTVYLQMNSLRPEDTAVYYCVAS

[chemical structure]

EVQFNWYVDGVEVHNAKTKPREEQFNSTYRVVSVLTVLHQDWLNGKEYKCKVSNKGLPSSIEKTISKAKGQPREPQ
VYTLPPSQEEMTKNQVSLTCLVKGFYPSDIAVEWESNGQPENNYKTTPPVLDSDGSFFLYSRLTVDKSRWQEGNVFS
CSVMHEALHNHYTQKSLSLSLGK
ODY-1097
(SEQ ID NO: 4500)
DVQLLESGGGLVQPGGSLRLSCAASGFTFDDIAMTWVRQAPGKGLEWVSSIYSYGPNTYYADSVKGRFTISTDSAKNTL

[chemical structure]

SLRLSCAASGFTFDDIAMTWVRQAPGKGLEWVSSIYSYGPNTYYADSVKGRFTISTDSAKNTLYLQMNSLRPEDTAVYY

[chemical structure]

VVDVSQEDPEVQFNWYVDGVEVHNAKTKPREEQFNSTYRVVSVLTVLHQDWLNGKEYKCKVSNKGLPSSIEKTISK
AKGQPREPQVYTLPPSQEEMTKNQVSLTCLVKGFYPSDIAVEWESNGQPENNYKTTPPVLDSDGSFFLYSRLTVDKS
RWQEGNVFSCSVMHEALHNHYTQKSLSLSLGK
ODY-1098
(SEQ ID NO: 4501)
DVQLLESGGGLVOPGGSLRLSCAASGRTESDYGMGWFRQAPGKDSEFVAAINWSNARTNYADSVKGRETISRDNAK

[chemical structure]

RLSCAASGRTFSDYGMGWFRQAPGKDSEFVAAINWSNARTNYADSVKGRFTISRDNAKNTGYLQMNSLRVEDTAVY

[chemical structure]

QEDPEVQFNWYVDGVEVHNAKTKPREEQFNSTYRVVSVLTVLHQDWLNGKEYKCKVSNKGLPSSIEKTISKAKGQP
REPQVYTLPPSQEEMTKNQVSLTCLVKGFYPSDIAVEWESNGQPENNYKTTPPVLDSDGSFFLYSRLTVDKSRWQEG
NVFSCSVMHEALHNHYTQKSLSLSLGK
ODY-1099
(SEQ ID NO: 4502)
DVQLLESGGGLVQPGGSLRLSCAASGRTFGSYTMGWFROAPGKEREFLASIRWTGGSTSYADSVKGRFTISRDDAKKT

[chemical structure]

CAASGRTFGSYTMGWFRQAPGKEREFLASIRWTGGSTSYADSVKGRFTISRDDAKKTVYLQMNSLRPEDTAVYYCVAS

[chemical structure]

VKFNWYVDGVEVHNAKTKPREEQYNSTYRVVSVLTVLHQDWINGKEYKCKVSNKALAAPIEKTISKAKGQPREPQ
VYTLPPSREEMTKNQVSLTCLVKGFYPSDIAVEWESNGQPENNYKTTPPVLDSDGSFFLYSKLTVDKSRWQQGNVFS
CSVMHEALHNHYTQKSLSLSPGK
ODY-1100
(SEQ ID NO:4503)
DVQLLESGGGLVQPGGSLRLSCAASGFTEDDIAMTWVRQAPGKGLEWVSSIYSYGPNTYYADSVKGRFTISTDSÅKNTL

[chemical structure]

SLRLSCAASGFTFDDIAMTWVRQAPGKGLEWVSSIYSYGPNTYYADSVKGRFTISTDSAKNTLYLQMNSLRPEDTAVYY

[chemical structure]

VDVSHEDPEVKFNWYVDGVEVHNAKTKPREEQYNSTYRVVSVLTVLHQDWLNGKEYKCKVSNKALAAPIEKTISKA
KGQPREPQVYTLPPSREEMTKNQVSLTCLVKGFYPSDIAVEWESNGQPENNYKTTPPVLDSDGSFFLYSKLTVDKSR
WQQGNVFSCSVMHEALHNHYTQKSLSLSPGK
ODY-1101
(SEQ ID NO: 4504)
DVQLLESGGGLVQPGGSLRLSCAASGRTFSDYGMGWFRQAPGKDSEFVAAINWSNARTNYADSVKGRFTISRDNAK

[chemical structure]

RLSCAASGRTFSDYGMGWFRQAPGKDSEFVAAINWSNARTNYADSVKGRFTISRDNAKNTGYLOMNSLRVEDTAVY

[chemical structure]

EDPEVKFNWYVDGVEVHNAKTKPREEQYNSTYRVVSVLTVLHQDWLNGKEYKCKVSNKALAAPIEKTISKAKGQPR
EPQVYTLPPSREEMTKNQVSLTCLVKGFYPSDIAVEWESNGQPENNYKTTPPVLDSDGSFFLYSKLTVDKSRWQQG
NVFSCSVMHEALHNHYTQKSLSLSPGK
ODY-1102
(SEQ ID NO: 4505)
EVQLLESGGGLVQPGGSLRLSCAASGRTFGSYTMGWFRQAPGKEREFLASIRWTGGSTSYADSVKGRFTISRDDAKKT

[chemical structure]

CAASGRTFGSYTMGWFRQAPGKEREFLASIRWTGGSTSYADSVKGRFTISRDDAKKTVYLQMNSLRPEDTAVYYCVAS

[chemical structure]

EVQFNWYVDGVEVHNAKTKPREEQFNSTYRVVSVLTVLHQDWLNGKEYKCKVSNKGLPSSIEKTISKAKGQPREPQ
VYTLPPSQEEMTKNQVSLTCLVKGFYPSDIAVEWESNGQPENNYKTTPPVLDSDGSFFLYSRLTVDKSRWQEGNVFS
CSVMHEALHNHYTQKSLSLSLGK
ODY-1103
(SEQ ID NO: 4506)
EVQLLESGGGLVQPGGSLRLSCAASGFTFDDIAMTWVRQAPGKGLEWVSSIYSYGPNTYYADSVKGRFTISTDSAKNTL

[chemical structure]

SLRLSCAASGFTFDDIAMTWVRQAPGKGLEWVSSIYSYGPNTYYADSVKGRFTISTDSAKNTLYLQMNSLRPEDTAVYY

[chemical structure]

VVDVSQEDPEVQFNWYVDGVEVHNAKTKPREEQFNSTYRVVSVLTVLHQDWLNGKEYKCKVSNKGLPSSIEKTISK
AKGQPREPQVYTLPPSQEEMTKNQVSLTCLVKGFYPSDIAVEWESNGQPENNYKTTPPVLDSDGSFFLYSRLTVDKS
RWQEGNVFSCSVMHEALHNHYTQKSLSLSLGK
ODY-1105
(SEQ ID NO: 4507)
EVQLLESGGGLVQPGGSLRLSCAASGRTFGSYTMGWFRQAPGKEREFLASIRWTGGSTSYADSVKGRFTISRDDAKKT

[chemical structure]

CAASGRTEGSYTMGWFRQAPGKEREFLASIRWTGGSTSYADSVKGRETISRDDAKKTVYLOMNSLRPEDTAVYYCVAS

[chemical structure]

VKFNWYVDGVEVHNAKTKPREEQYNSTYRVVSVLTVLHQDWLNGKEYKCKVSNKALAAPIEKTISKAKGQPREPQ
VYTLPPSREEMTKNQVSLTCLVKGFYPSDIAVEWESNGQPENNYKTTPPVLDSDGSFFLYSKLTVDKSRWQQGNVFS
CSVMHEALHNHYTQKSLSLSPGK
ODY-1106
(SEQ ID NO: 4508)
EVQLLESGGGLVQPGGSLRLSCAASGFTFDDIAMTWVRQAPGKGLEWVSSIYSYGPNTYYADSVKGRFTISTDSAKNTL

[chemical structure]

SLRLSCAASGETFDDIAMTWVRQAPGKGLEWVSSIYSYGPNTYYADSVKGRFTISTDSAKNTLYLOMNSLRPEDTAVYY

[chemical structure]

VDVSHEDPEVKFNWYVDGVEVHNAKTKPREEQYNSTYRVVSVLTVLHQDWLNGKEYKCKVSNKALAAPIEKTISKA
KGQPREPQVYTLPPSREEMTKNQVSLTCLVKGFYPSDIAVEWESNGQPENNYKTTPPVLDSDGSFFLYSKLTVDKSR
WQQGNVFSCSVMHEALHNHYTQKSLSLSPGK
ODY-1109
(SEQ ID NO: 4509)
DVQLLESGGGLVQPGGSLRLSCAASGFTFDDIAMTWVRQAPGKGLEWVSSIYSYGPNTYYADSVKGRFTISTDSAKNTL

[chemical structure]

GSLRLSCAASGETEDDIAMTWVRQAPGKGLEWVSSIYSYGPNTYYADSVKGRETISTDSAKNTLYLOMNSLRPEDTAVY

[chemical structure]

VVVDVSQEDPEVQFNWYVDGVEVHNAKTKPREEQFNSTYRVVSVLTVLHQDWINGKEYKCKVSNKGLPSSIEKTIS
KAKGQPREPQVYTLPPSQEEMTKNQVSLTCLVKGFYPSDIAVEWESNGQPENNYKTTPPVLDSDGSFFLYSRLTVDK
SRWQEGNVFSCSVMHEALHNHYTQKSLSLSLGK
ODY-1112
(SEQ ID NO: 4510)
DVQLLESGGGLVOPGGSLRLSCAASGFTEDDIAMTWVRQAPGKGLEWVSSIYSYGPNTYYADSVKGRFTISTDSAKNTL

[chemical structure]

GSLRISCAASGFTFDDIAMTWVRQAPGKGLEWVSSIYSYGPNTYYADSVKGRFTISTDSAKNTLYLQMNSLRPEDTAVY

[chemical structure]

VVDVSHEDPEVKFNWYVDGVEVHNAKTKPREEQYNSTYRVVSVLTVLHQDWLNGKEYKCKVSNKALAAPIEKTISK
AKGQPREPQVYTLPPSREEMTKNQVSLTCLVKGFYPSDIAVEWESNGQPENNYKTTPPVLDSDGSFFLYSKLTVDKS
RWQQGNVFSCSVMHEALHNHYTQKSLSLSPGK
ODY-1114
(SEQ ID NO: 4511)
DVQLLESGGGLVQPGGSLRLSCAASGRTFGSYTMGWFRQAPGKEREFLASIRWTGGSTSYADSVKGRETISRDDAKKT

[chemical structure]

SCAASGRTFGSYTMGWFRQAPGKEREFLASIRWTGGSTSYADSVKGRETISRDDAKKTVYLOMNSLRPEDTAVYYCVA

[chemical structure]

PEVQFNWYVDGVEVHNAKTKPREEQFNSTYRVVSVLTVLHQDWLNGKEYKCKVSNKGLPSSIEKTISKAKGQPREP
QVYTLPPSQEEMTKNQVSLTCLVKGFYPSDIAVEWESNGQPENNYKTTPPVLDSDGSFFLYSRLTVDKSRWQEGNV
FSCSVMHEALHNHYTQKSISISLGK
ODY-1115
(SEQ ID NO: 4512)
DVQLLESGGGLVQPGGSLRLSCAASGFTFDDIAMTWVRQAPGKGLEWVSSIYSYGPNTYYADSVKGRFTISTDSAKNTL

[chemical structure]

GSLRLSCAASGFTFDDIAMTWVRQAPGKGLEWVSSIYSYGPNTYYADSVKGRFTISTDSAKNTLYLOMNSLRPEDTAVY

[chemical structure]

VVVDVSQEDPEVQFNWYVDGVEVHNAKTKPREEQFNSTYRVVSVLTVLHQDWINGKEYKCKVSNKGLPSSIEKTIS
KAKGQPREPQVYTLPPSQEEMTKNQVSLTCLVKGFYPSDIAVEWESNGQPENNYKTTPPVLDSDGSFFLYSRLTVDK
SRWQEGNVFSCSVMHEALHNHYTQKSLSLSLGK
ODY-1116
(SEQ ID NO: 4513)
DVQLLESGGGLVQPGGSLRLSCAASGRTESDYGMGWFRQAPGKDSEFVAAINWSNARTNYADSVKGRFTISRDNAK

[chemical structure]

RLSCAASGRTFSDYGMGWFRQAPGKDSEFVAAINWSNARTNYADSVKGRETISRDNAKNTGYLQMNSLRVEDTAVY

[chemical structure]

SQEDPEVQFNWYVDGVEVHNAKTKPREEQFNSTYRVVSVLTVLHQDWLNGKEYKCKVSNKGLPSSIEKTISKAKGQ
PREPQVYTLPPSQEEMTKNQVSLTCLVKGFYPSDIAVEWESNGQPENNYKTTPPVLDSDGSFFLYSRLTVDKSRWQE
GNVFSCSVMHEALHNHYTQKSLSLSLGK
ODY-1164
(SEQ ID NO: 4709)
EVQLLESGGGLVOPGGSLRLSCAASGRTFSDYGMGWFRQAPGKDSEFVAAINWSNARTNYADSVKGRFTISRDNAKN

[chemical structure]

SCAASGRTFSDYGMGWFRQAPGKDSEFVAAINWSNARTNYADSVKGRFTISRDNAKNTGYLQMNSLRVEDTAVYYC

[chemical structure]

EDPEVQFNWYVDGVEVHNAKTKPREEQFNSTYRVVSVLTVLHQDWLNGKEYKCKVSNKGLPSSIEKTISKAKGQPR
EPQVYTLPPSQEEMTKNQVSLTCLVKGFYPSDIAVEWESNGQPENNYKTTPPVLDSDGSFFLYSRLTVDKSRWQEG
NVFSCSVMHEALHNHYTQKSLSLSLGK
ODY-1165
(SEQ ID NO: 4710)
EVQLLESGGGLVQPGGSLRLSCAASGRTFSDYGMGWFRQAPGKDSEFVAAINWSNARTNYADSVKGRFTISRDNAKN

[chemical structure]

SCAASGRTFSDYGMGWFRQAPGKDSEFVAAINWSNARTNYADSVKGRFTISRDNAKNTGYLQMNSLRVEDTAVYYC

[chemical structure]

DPEVKFNWYVDGVEVHNAKTKPREEQYNSTYRVVSVLTVLHQDWLNGKEYKCKVSNKALAAPIEKTISKAKGQPRE
PQVYTLPPSREEMTKNQVSLTCLVKGFYPSDIAVEWESNGQPENNYKTTPPVLDSDGSFFLYSKLTVDKSRWQQGN
VFSCSVMHEALHNHYTQKSLSLSPGK
ODY-1166
(SEQ ID NO: 4711)
DVQLLESGGGLVQPGGSLRLSCAASGRTESDYGMGWFROAPGKDSEFVAAINWSNARTNYADSVKGRFTISRDNAK

[chemical structure]

RLSCAASGRTESDYGMGWFRQAPGKDSEFVAAINWSNARTNYADSVKGRFTISRDNAKNTGYLQMNSLRVEDTAVY

[chemical structure]

SQEDPEVQFNWYVDGVEVHNAKTKPREEQFNSTYRVVSVLTVLHQDWLNGKEYKCKVSNKGLPSSIEKTISKAKGQ
PREPQVYTLPPSQEEMTKNQVSLTCLVKGFYPSDIAVEWESNGQPENNYKTTPPVLDSDGSFFLYSRLTVDKSRWQE
GNVFSCSVMHEALHNHYTQKSLSLSLGK
ODY-1167
(SEQ ID NO: 4712)
DVQLLESGGGLVQPGGSLRLSCAASGRTFSDYGMGWFRQAPGKDSEFVAAINWSNARTNYADSVKGRFTISRDNAK

[chemical structure]

RLSCAASGRTFSDYGMGWFRQAPGKDSEFVAAINWSNARTNYADSVKGRFTISRDNAKNTGYLQMNSLRVEDTAVY
YCAAAPSGKAYSYWGQGTQVTVSSGGGGSDKTHTCPPCPAPEAAGGPSVFLFPPKPKDTLMISRTPEVTCVVVDVS
HEDPEVKFNWYVDGVEVHNAKTKPREEQYNSTYRVVSVLTVLHQDWLNGKEYKCKVSNKALAAPIEKTISKAKGQP
REPQVYTLPPSREEMTKNQVSLTCLVKGFYPSDIAVEWESNGQPENNYKTTPPVLDSDGSFFLYSKLTVDKSRWQQ
GNVFSCSVMHEALHNHYTQKSLSLSPGK
ODY-1168
(SEQ ID NO: 4713)
EVQLLESGGGLVQPGGSLRLSCAASGRTFSDYGMGWFROAPGKDSEFVAAINWSNARTNYADSVKGRFTISRDNAKN

[chemical structure]

LSCAASGRIESDYGMGWFROAPGKDSEFVAAINWSNARTNYADSVKGRETISRDNAKNTGYLOMNSLRVEDTAVYY

[chemical structure]

QEDPEVQFNWYVDGVEVHNAKTKPREEQFNSTYRVVSVLTVLHQDWLNGKEYKCKVSNKGLPSSIEKTISKAKGQP
REPQVYTLPPSQEEMTKNQVSLTCLVKGFYPSDIAVEWESNGQPENNYKTTPPVLDSDGSFFLYSRLTVDKSRWQEG
NVFSCSVMHEALHNHYTQKSLSLSLGK
ODY-1169
(SEQ ID NO: 4714)
EVQLLESGGGLVOPGGSLRLSCAASGRTFSDYGMGWFRQAPGKDSEFVAAINWSNARTNYADSVKGRFTISRDNAKN

[chemical structure]

LSCAASGRTFSDYGMGWFRQAPGKDSEFVAAINWSNARTNYADSVKGRFTISRDNAKNTGYLQMNSLRVEDTAVYY

[chemical structure]

EDPEVKFNWYVDGVEVHNAKTKPREEQYNSTYRVVSVLTVLHQDWLNGKEYKCKVSNKALAAPIEKTISKAKGQPR
EPQVYTLPPSREEMTKNQVSLTCLVKGFYPSDIAVEWESNGQPENNYKTTPPVLDSDGSFFLYSKLTVDKSRWQQG
NVFSCSVMHEALHNHYTQKSLSLSPGK
ODY-1170
(SEQ ID NO: 4715)
DVQLLESGGGLVQPGGSLRLSCAASGRTESDYGMGWFRQAPGKDSEFVAAINWSNARTNYADSVKGRETISRDNAK

[chemical structure]

RLSCAASGRTFSDYGMGWFRQAPGKDSEFVAAINWSNARTNYADSVKGRFTISRDNAKNTGYLQMNSLRVEDTAVY

[chemical structure]

SQEDPEVQFNWYVDGVEVHNAKTKPREEQFNSTYRVVSVLTVLHQDWLNGKEYKCKVSNKGLPSSIEKTISKAKGQ
PREPQVYTLPPSQEEMTKNQVSLTCLVKGFYPSDIAVEWESNGQPENNYKTTPPVLDSDGSFFLYSRLTVDKSRWQE
GNVFSCSVMHEALHNHYTQKSLSLSLGK
ODY-1171
(SEQ ID NO: 4716)
DVQLLESGGGLVOPGGSLRLSCÅASGRTESDYGMGWFRQAPGKDSEFVAAINWSNARTNYADSVKGRETISRDNAK

[chemical structure]

LRLSCAASGRTFSDYGMGWFRQAPGKDSEFVAAINWSNARTNYADSVKGRFTISRDNAKNTGYLQMNSLRVEDTAVY

[chemical structure]

SQEDPEVQFNWYVDGVEVHNAKTKPREEQFNSTYRVVSVLTVLHQDWLNGKEYKCKVSNKGLPSSIEKTISKAKGQ
PREPQVYTLPPSQEEMTKNQVSLTCLVKGFYPSDIAVEWESNGQPENNYKTTPPVLDSDGSFFLYSRLTVDKSRWQE
GNVFSCSVMHEALHNHYTQKSLSLSLGK
ODY-1213
(SEQ ID NO: 4735)
EVQLLESGGGLVQPGGSLRLSCAASGRTFSDYGMGWFRQAPGKEREFVATINWSNGRTTYADSVKGRFTISRDNAKN

[chemical structure]

SCAASGRTFSDYGMGWFRQAPGKEREFVATINWSNGRTTYADSVKGRFTISRDNAKNTGYLOMNSLRVEDTAVYYCA

[chemical structure]

DPEVQFNWYVDGVEVHNAKTKPREEQFNSTYRVVSVLTVLHQDWLNGKEYKCKVSNKGLPSSIEKTISKAKGQPRE
PQVYTLPPSQEEMTKNQVSLTCLVKGFYPSDIAVEWESNGQPENNYKTTPPVLDSDGSFFLYSRLTVDKSRWQEGN
VFSCSVMHEALHNHYTQKSLSLSLGK
ODY-1214
(SEQ ID NO: 4736)
EVQLLESGGGLVQPGGSLRLSCAASGRTFSDYGMGWFRQAPGKEREFVATINWSNGRTTYADSVKGRETISRDNAKN

[chemical structure]

SCAASGRTESDYGMGWFRQAPGKEREFVATINWSNGRTTYADSVKGRETISRDNAKNTGYLQMNSLRVEDTAVYYCA

[chemical structure]

PEVKFNWYVDGVEVHNAKTKPREEQYNSTYRVVSVLTVLHQDWLNGKEYKCKVSNKALAAPIEKTISKAKGQPREP
QVYTLPPSREEMTKNQVSLTCLVKGFYPSDIAVEWESNGQPENNYKTTPPVLDSDGSFFLYSKLTVDKSRWQQGNV
FSCSVMHEALHNHYTQKSLSLSPGK
ODY-1215
(SEQ ID NO: 4737)
DVQLLESGGGLVQPGGSLRLSCAASGRTFSDYGMGWFRQAPGKEREFVATINWSNGRTTYADSVKGRFTISRDNAKN

[chemical structure]

LSCAASGRTFSDYGMGWFRQAPGKEREFVATINWSNGRTTYADSVKGRFTISRDNAKNTGYLQMNSLRVEDTAVYYC

[chemical structure]

EDPEVQFNWYVDGVEVHNAKTKPREEQFNSTYRVVSVLTVLHQDWINGKEYKCKVSNKGLPSSIEKTISKAKGQPR
EPQVYTLPPSQEEMTKNQVSLTCLVKGFYPSDIAVEWESNGQPENNYKTTPPVLDSDGSFFLYSRLTVDKSRWQEG
NVFSCSVMHEALHNHYTQKSLSLSLGK
ODY-1216
(SEQ ID NO: 4738)
DVQLLESGGGLVQPGGSLRLSCAASGRTESDYGMGWFRQAPGKEREFVATINWSNGRTTYADSVKGRFTISRDNAKN

[chemical structure]

LSCAASGRTESDYGMGWFROAPGKEREFVATINWSNGRTTYADSVKGRETISRDNAKNTGYLQMNSLRVEDTAVYYC

[chemical structure]

DPEVKFNWYVDGVEVHNAKTKPREEQYNSTYRVVSVLTVLHQDWLNGKEYKCKVSNKALAAPIEKTISKAKGQPRE
PQVYTLPPSREEMTKNQVSLTCLVKGFYPSDIAVEWESNGQPENNYKTTPPVLDSDGSFFLYSKLTVDKSRWQQGN
VFSCSVMHEALHNHYTQKSLSLSPGK
ODY-1217
(SEQ ID NO: 4739)
EVQLLESGGGLVOPGGSLRLSCAÅSGRTESDYGMGWFRQAPGKEREFVATINWSNGRTTYADSVKGRETISRDNAKN

[chemical structure]

LSCAASGRTESDYGMGWFROAPGKEREFVATINWSNGRTTYADSVKGRFTISRDNAKNTGYLQMNSLRVEDTAVYYC

[chemical structure]

EDPEVQFNWYVDGVEVHNAKTKPREEQFNSTYRVVSVLTVLHQDWLNGKEYKCKVSNKGLPSSIEKTISKAKGQPR
EPQVYTIPPSQEEMTKNQVSLTCLVKGFYPSDIAVEWESNGQPENNYKTTPPVLDSDGSFFLYSRLTVDKSRWQEG
NVFSCSVMHEALHNHYTQKSLSLSLGK
ODY-1218
(SEQ ID NO: 4740)
EVQLLESGGGLVQPGGSLRLSCAASGRTESDYGMGWFROAPGKEREFVATINWSNGRTTYADSVKGRFTISRDNAKN

[chemical structure]

LSCAASGRTFSDYGMGWFRQAPGKEREFVATINWSNGRTTYADSVKGRFTISRDNAKNTGYLQMNSLRVEDTAVYC

[chemical structure]

DPEVKFNWYVDGVEVHNAKTKPREEQYNSTYRVVSVLTVLHQDWLNGKEYKCKVSNKALAAPIEKTISKAKGQPRE
PQVYTLPPSREEMTKNQVSLTCLVKGFYPSDIAVEWESNGQPENNYKTTPPVLDSDGSFFLYSKLTVDKSRWQQGN
VFSCSVMHEALHNHYTQKSLSLSPGK
ODY-1219
(SEQ ID NO: 4741)
DVQLLESGGGLVQPGGSLRLSCAASGRTESDYGMGWFROAPGKEREFVATINWSNGRTTYÅDSVKGRETISRDNAKN

[chemical structure]

LSCAASGRTFSDYGMGWFRQAPGKEREFVATINWSNGRTTYADSVKGRFTISRDNAKNTGYLQMNSLRVEDTAVYYC

[chemical structure]

EDPEVQFNWYVDGVEVHNAKTKPREEQFNSTYRVVSVLTVLHQDWLNGKEYKCKVSNKGLPSSIEKTISKAKGQPR
EPQVYTLPPSQEEMTKNQVSLTCLVKGFYPSDIAVEWESNGQPENNYKTTPPVLDSDGSFFLYSRLTVDKSRWQEG
NVFSCSVMHEALHNHYTQKSLSLSLGK
ODY-1220
(SEQ ID NO: 4742)
DVQLLESGGGLVQPGGSLRLSCAASGRTFSDYGMGWFRQAPGKEREFVATINWSNGRTTYADSVKGRFTISRDNAKN

[chemical structure]

LSCAASGRTFSDYGMGWFRQAPGKEREFVATINWSNGRTTYADSVKGRFTISRDNAKNTGYLQMNSLRVEDTAVYYC

[chemical structure]

DPEVKFNWYVDGVEVHNAKTKPREEQYNSTYRVVSVLTVLHQDWINGKEYKCKVSNKALAAPIEKTISKAKGQPRE
PQVYTLPPSREEMTKNQVSLTCLVKGFYPSDIAVEWESNGQPENNYKTTPPVLDSDGSFFLYSKLTVDKSRWQQGN
VFSCSVMHEALHNHYTQKSLSLSPGK
ODY-1221
(SEQ ID NO: 4743)
DVQLLESGGGLVQPGGSLRLSCAASGRTESDYGMGWFRQAPGKEREFVATINWSNGRTTYADSVKGRETISRDNAKN

[chemical structure]

LSCAASGRTESDYGMGWFROAPGKEREFVATINWSNGRTTYADSVKGRFTISRDNAKNTGYLOMNSLRVEDTAVYYC

[chemical structure]

EDPEVQFNWYVDGVEVHNAKTKPREEQFNSTYRVVSVLTVLHQDWLNGKEYKCKVSNKGLPSSIEKTISKAKGQPR
EPQVYTLPPSQEEMTKNQVSLTCLVKGFYPSDIAVEWESNGQPENNYKTTPPVLDSDGSFFLYSRLTVDKSRWQEG
NVFSCSVMHEALHNHYTQKSLSLSLGK
ODY-1222
SEQ ID NO: (4744)
EVQLLESGGGLVOPGGSLRLSCAASGRTFSDYGMGWFROAPGKEREFVATINWSNARTTYADSVKGRFTISRDNAKN

[chemical structure]

SCAASGRTFSDYGMGWFRQAPGKEREFVATINWSNARTTYADSVKGRFTISRDNAKNTGYLQMNSLRVEDTAVYYCA

[chemical structure]

DPEVQFNWYVDGVEVHNAKTKPREEQFNSTYRVVSVLTVLHQDWLNGKEYKCKVSNKGLPSSIEKTISKAKGQPRE
PQVYTLPPSQEEMTKNQVSLTCLVKGFYPSDIAVEWESNGQPENNYKTTPPVLDSDGSFFLYSRLTVDKSRWQEGN
VFSCSVMHEALHNHYTQKSLSLSLGK
(ODY-1223)
(SEQ ID NO: 4745)
EVQLLESGGGLVQPGGSLRLSCAASGRTFSDYGMGWFRQAPGKEREFVATINWSNARTTYADSVKGRFTISRDNAKN

[chemical structure]

SCAASGRTFSDYGMGWFRQAPGKEREFVATINWSNARTTYADSVKGRFTISRDNAKNTGYLQMNSLRVEDTAVYYCA

[chemical structure]

PEVKFNWYVDGVEVHNAKTKPREEQYNSTYRVVSVLTVLHQDWINGKEYKCKVSNKALAAPIEKTISKAKGQPREP
QVYTLPPSREEMTKNQVSLTCLVKGFYPSDIAVEWESNGQPENNYKTTPPVLDSDGSFFLYSKLTVDKSRWQQGNV
FSCSVMHEALHNHYTQKSLSLSPGK
ODY-1224
(SEQ ID NO: 4746)
DVQLLESGGGLVQPGGSLRLSCAASGRTFSDYGMGWFRQAPGKEREFVATINWSNARTTYADSVKGRFTISRDNAKN

[chemical structure]

LSCAASGRTFSDYGMGWFRQAPGKEREFVATINWSNARTTYADSVKGRFTISRDNAKNTGYLOMNSLRVEDTAVYYC

[chemical structure]

EDPEVQFNWYVDGVEVHNAKTKPREEQFNSTYRVVSVLTVLHQDWLNGKEYKCKVSNKGLPSSIEKTISKAKGQPR
EPQVYTLPPSQEEMTKNQVSLTCLVKGFYPSDIAVEWESNGQPENNYKTTPPVLDSDGSFFLYSRLTVDKSRWQEG
NVFSCSVMHEALHNHYTQKSLSLSLGK
ODY-1225
(SEQ ID NO: 4747)
DVQLLESGGGLVQPGGSLRLSCAASGRTESDYGMGWFRQAPGKEREFVATINWSNARTTYADSVKGRETISRDNAKN

[chemical structure]

LSCAASGRTESDYGMGWFROAPGKEREFVATINWSNARTTYADSVKGRETISRDNAKNTGYLOMNSLRVEDTAVYYC

[chemical structure]

DPEVKFNWYVDGVEVHNAKTKPREEQYNSTYRVVSVLTVLHQDWLNGKEYKCKVSNKALAAPIEKTISKAKGQPRE
PQVYTLPPSREEMTKNQVSLTCLVKGFYPSDIAVEWESNGQPENNYKTTPPVLDSDGSFFLYSKLTVDKSRWQQGN
VFSCSVMHEALHNHYTQKSLSLSPGK
ODY-1226
(SEQ ID NO: 4748)
EVQLLESGGGLVQPGGSLRLSCAASGRTFSDYGMGWFRQAPGKEREFVATINWSNARTTYADSVKGRFTISRDNAKN

[chemical structure]

LSCAASGRTFSDYGMGWFRQAPGKEREFVATINWSNARTTYADSVKGRFTISRDNAKNTGYLQMNSLRVEDTAVYYC

[chemical structure]

EDPEVQFNWYVDGVEVHNAKTKPREEQFNSTYRVVSVLTVLHQDWLNGKEYKCKVSNKGLPSSIEKTISKAKGQPR
EPQVYTLPPSQEEMTKNQVSLTCLVKGFYPSDIAVEWESNGQPENNYKTTPPVLDSDGSFFLYSRLTVDKSRWQEG
NVFSCSVMHEALHNHYTQKSLSLSLGK
ODY-1227
SEQ ID NO: 4749)
EVQLLESGGGLVQPGGSLRLSCAASGRTFSDYGMGWFRQAPGKEREFVATINWSNARTTYADSVKGRFTISRDNAKN

[chemical structure]

LSCAASGRTESDYGMGWFRQAPGKEREFVATINWSNARTTYADSVKGRETISRDNAKNTGYLQMNSLRVEDTAVYYC

[chemical structure]

DPEVKFNWYVDGVEVHNAKTKPREEQYNSTYRVVSVLTVLHQDWLNGKEYKCKVSNKALAAPIEKTISKAKGQPRE
PQVYTLPPSREEMTKNQVSLTCLVKGFYPSDIAVEWESNGQPENNYKTTPPVLDSDGSFFLYSKLTVDKSRWQQGN
VFSCSVMHEALHNHYTQKSLSLSPGK
(ODY-1228)
(SEQ ID NO: 4750)
DVQLLESGGGLVQPGGSLRLSCAASGRTESDYGMGWFRQAPGKEREFVATINWSNARTTYADSVKGRFTISRDNAKN

[chemical structure]

LSCAASGRTFSDYGMGWFROAPGKEREFVATINWSNARTTYADSVKGRFTISRDNAKNTGYLQMNSLRVEDTAVYYC

[chemical structure]

EDPEVQFNWYVDGVEVHNAKTKPREEQFNSTYRVVSVLTVLHQDWLNGKEYKCKVSNKGLPSSIEKTISKAKGQPR
EPQVYTLPPSQEEMTKNQVSLTCLVKGFYPSDIAVEWESNGQPENNYKTTPPVLDSDGSFFLYSRLTVDKSRWQEG
NVFSCSVMHEALHNHYTQKSLSLSLGK
ODY-1229
(SEQ ID NO: 4751)
DVQLLESGGGLVQPGGSLRLSCAASGRTFSDYGMGWFRQAPGKEREFVATINWSNARTTYADSVKGRFTISRDNAKN

[chemical structure]

LSCAASGRTESDYGMGWFROAPGKEREFVATINWSNARTTYADSVKGRETISRDNAKNTGYLOMNSLRVEDTAVYYC

[chemical structure]

DPEVKFNWYVDGVEVHNAKTKPREEQYNSTYRVVSVLTVLHQDWINGKEYKCKVSNKALAAPIEKTISKAKGQPRE
PQVYTLPPSREEMTKNQVSLTCLVKGFYPSDIAVEWESNGQPENNYKTTPPVLDSDGSFFLYSKLTVDKSRWQQGN
VFSCSVMHEALHNHYTQKSLSLSPGK
ODY-1230
(SEQ ID NO: 4752)
DVQLLESGGGLVOPGGSLRLSCAASGRTESDYGMGWERQAPGKEREFVATINWSNARTTYADSVKGRETISRDNAKN

[chemical structure]

LSCAASGRTFSDYGMGWFRQAPGKEREFVATINWSNARTTYADSVKGRFTISRDNAKNTGYLQMNSLRVEDTAVYYC

[chemical structure]

EDPEVQFNWYVDGVEVHNAKTKPREEQFNSTYRVVSVLTVLHQDWLNGKEYKCKVSNKGLPSSIEKTISKAKGQPR
EPQVYTLPPSQEEMTKNQVSLTCLVKGFYPSDIAVEWESNGQPENNYKTTPPVLDSDGSFFLYSRLTVDKSRWQEG
NVFSCSVMHEALHNHYTQKSLSLSLGK
ODY-1231
(SEQ ID NO: 4753)
EVQLLESGGGLVQPGGSLRLSCAASGRTFSDYGMGWFRQAPGKEHEFVASINWSNGRTSYADSAKGRIFTISRDNAKN

[chemical structure]

SCAASGRTESDYGMGWFRQAPGKEHEFVASINWSNGRTSYADSAKGRETISRDNAKNTGYLQMNSLRVEDTAVYYCA

[chemical structure]

DPEVQFNWYVDGVEVHNAKTKPREEQFNSTYRVVSVLTVLHQDWLNGKEYKCKVSNKGLPSSIEKTISKAKGQPRE
PQVYTLPPSQEEMTKNQVSLTCLVKGFYPSDIAVEWESNGQPENNYKTTPPVLDSDGSFFLYSRLTVDKSRWQEGN
VFSCSVMHEALHNHYTQKSLSLSLGK
ODY-1232
(SEQ ID NO: 4754)
EVQLLESGGGLVQPGGSLRLSCAASGRTFSDYGMGWFRQAPGKEHEFVASINWSNGRTSYADSAKGRFTISRDNAKN

[chemical structure]

SCAASGRTFSDYGMGWFRQAPGKEHEFVASINWSNGRTSYADSAKGRFTISRDNAKNTGYLQMNSLRVEDTAVYYCA

[chemical structure]

EVKFNWYVDGVEVHNAKTKPREEQYNSTYRVVSVLTVLHQDWLNGKEYKCKVSNKALAAPIEKTISKAKGQPREPQ
VYTLPPSREEMTKNQVSLTCLVKGFYPSDIAVEWESNGQPENNYKTTPPVLDSDGSFFLYSKLTVDKSRWQQGNVFS
CSVMHEALHNHYTQKSLSLSPGK
ODY-1233
(SEQ ID NO: 4755)
DVQLLESGGGLVQPGGSLRLSCAASGRTFSDYGMGWFRQAPGKEHEFVASINWSNGRTSYADSAKGRFTISRDNAKN

[chemical structure]

SCAASGRTESDYGMGWFROAPGKEHEFVASINWSNGRTSYADSAKGRETISRDNAKNTGYLQMNSLRVEDTAVYYCA

[chemical structure]

DPEVQFNWYVDGVEVHNAKTKPREEQFNSTYRVVSVLTVLHQDWLNGKEYKCKVSNKGLPSSIEKTISKAKGQPRE
PQVYTLPPSQEEMTKNQVSLTCLVKGFYPSDIAVEWESNGQPENNYKTTPPVLDSDGSFFLYSRLTVDKSRWQEGN
VFSCSVMHEALHNHYTQKSLSLSLGK
ODY-1234
(SEQ ID NO: 4756)
DVQLLESGGGLVQPGGSLRLSCAASGRTESDYGMGWFROAPGKEHEFVASINWSNGRTSYADSAKGRETISRDNAKN

[chemical structure]

SCAASGRTESDYGMGWFRQAPGKEHEFVASINWSNGRTSYADSAKGRFTISRDNAKNTGYLQMNSLRVEDTAVYYCA

[chemical structure]

EVKFNWYVDGVEVHNAKTKPREEQYNSTYRVVSVLTVLHQDWLNGKEYKCKVSNKALAAPIEKTISKAKGQPREPQ
VYTLPPSREEMTKNQVSLTCLVKGFYPSDIAVEWESNGQPENNYKTTPPVLDSDGSFFLYSKLTVDKSRWQQGNVFS
CSVMHEALHNHYTQKSLSLSPGK
ODY-1235
(SEQ ID NO: 4757)
EVQLLESGGGLVQPGGSLRLSCAASGRTFSDYGMGWFRQAPGKEHEFVASINWSNGRTSYADSAKGRFTISRDNAKN

[chemical structure]

SCAASGRTESDYGMGWFRQAPGKEHEFVASINWSNGRTSYADSAKGRETISRDNAKNTGYLOMNSLRVEDTAVYYCA

[chemical structure]

DPEVQFNWYVDGVEVHNAKTKPREEQFNSTYRVVSVLTVLHQDWLNGKEYKCKVSNKGLPSSIEKTISKAKGQPRE
PQVYTLPPSQEEMTKNQVSLTCLVKGFYPSDIAVEWESNGQPENNYKTTPPVLDSDGSFFLYSRLTVDKSRWQEGN
VFSCSVMHEALHNHYTQKSLSLSLGK
ODY-1236
(SEQ ID NO: 4758)
EVQLLESGGGLVQPGGSLRLSCAASGRTFSDYGMGWFRQAPGKEHEFVASINWSNGRTSYADSAKGRFTISRDNAKN

[chemical structure]

SCAASGRTESDYGMGWFRQAPGKEHEFVASINWSNGRTSYADSAKGRETISRDNAKNTGYLQMNSLRVEDTAVYYCA

[chemical structure]

PEVKFNWYVDGVEVHNAKTKPREEQYNSTYRVVSVLTVLHQDWLNGKEYKCKVSNKALAAPIEKTISKAKGQPREP
QVYTLPPSREEMTKNQVSLTCLVKGFYPSDIAVEWESNGQPENNYKTTPPVLDSDGSFFLYSKLTVDKSRWQQGNV
FSCSVMHEALHNHYTQKSLSLSPGK
ODY-1237
(SEQ ID NO: 4759)
DVQLLESGGGLVQPGGSLRLSCAASGRTFSDYGMGWFRQAPGKEHEFVASINWSNGRTSYADSAKGRFTISRDNAKN

[chemical structure]

LSCAASGRTFSDYGMGWFRQAPGKEHEFVASINWSNGRTSYADSAKGRFTISRDNAKNTGYLQMNSLRVEDTAVYYC

[chemical structure]

EDPEVQFNWYVDGVEVHNAKTKPREEQFNSTYRVVSVLTVLHQDWLNGKEYKCKVSNKGLPSSIEKTISKAKGQPR
EPQVYTLPPSQEEMTKNQVSLTCLVKGFYPSDIAVEWESNGQPENNYKTTPPVLDSDGSFFLYSRLTVDKSRWQEG
NVFSCSVMHEALHNHYTQKSLSLSLGK
ODY-1238
(SEQ ID NO: 4760)
DVQLLESGGGLVQPGGSLRLSCAASGRTFSDYGMGWFRQAPGKEHEFVASINWSNGRTSYADSAKGRETISRDNAKN

[chemical structure]

LSCAASGRTFSDYGMGWFRQAPGKEHEFVASINWSNGRTSYADSAKGRETISRDNAKNTGYLQMNSLRVEDTAVYYC

[chemical structure]

DPEVKFNWYVDGVEVHNAKTKPREEQYNSTYRVVSVLTVLHQDWLNGKEYKCKVSNKALAAPIEKTISKAKGQPRE
PQVYTLPPSREEMTKNQVSLTCLVKGFYPSDIAVEWESNGQPENNYKTTPPVLDSDGSFFLYSKLTVDKSRWQQGN
VFSCSVMHEALHNHYTQKSLSLSPGK
ODY-1239
(SEQ ID NO: 4761)
DVQLLESGGGLVOPGGSLRLSCAASGRTESDYGMGWFRQAPGKEHEFVASINWSNGRTSYADSAKGRETISRDNAKN

[chemical structure]

LSCAASGRTESDYGMGWFROAPGKEHEFVASINWSNGRTSYADSAKGRFTISRDNAKNTGYLQMNSLRVEDTAVYYC

[chemical structure]

EDPEVQFNWYVDGVEVHNAKTKPREEQFNSTYRVVSVLTVLHQDWLNGKEYKCKVSNKGLPSSIEKTISKAKGQPR
EPQVYTLPPSQEEMTKNQVSLTCLVKGFYPSDIAVEWESNGQPENNYKTTPPVLDSDGSFFLYSRLTVDKSRWQEG
NVFSCSVMHEALHNHYTQKSLSLSLGK
ODY-1240
(SEQ ID NO: 4762)
EVQLLESGGGLVOPGGSLRLSCAASGRTFSDYGMGWFRQAPGKEHEFVASINWSNARTSYADSAKGRFTISRDNAKN

[chemical structure]

SCAASGRTFSDYGMGWFRQAPGKEHEFVASINWSNARTSYADSAKGRFTISRDNAKNTGYLOMNSLRVEDTAVYYCA

[chemical structure]

DPEVQFNWYVDGVEVHNAKTKPREEQFNSTYRVVSVLTVLHQDWLNGKEYKCKVSNKGLPSSIEKTISKAKGQPRE
PQVYTLPPSQEEMTKNQVSLTCLVKGFYPSDIAVEWESNGQPENNYKTTPPVLDSDGSFFLYSRLTVDKSRWQEGN
VFSCSVMHEALHNHYTQKSLSLSLGK
ODY-1241
(SEQ ID NO: 4763)
EVQLLESGGGLVQPGGSLRLSCAASGRTESDYGMGWFRQAPGKEHEFVASINWSNARTSYADSÅKGRFTISRDNÅKN

[chemical structure]

SCAASGRTESDYGMGWFRQAPGKEHEFVASINWSNARTSYADSAKGRFTISRDNAKNTGYLQMNSLRVEDTAVYYCA

[chemical structure]

EVKFNWYVDGVEVHNAKTKPREEQYNSTYRVVSVLTVLHQDWLNGKEYKCKVSNKALAAPIEKTISKAKGQPREPQ
VYTLPPSREEMTKNQVSLTCLVKGFYPSDIAVEWESNGQPENNYKTTPPVLDSDGSFFLYSKLTVDKSRWQQGNVFS
CSVMHEALHNHYTQKSLSLSPGK
ODY-1242
(SEQ ID NO: 4764)
DVQLLESGGGLVQPGGSLRLSCAASGRTESDYGMGWFRQAPGKEHEFVASINWSNARTSYADSAKGRFTISRDNAKN

[chemical structure]

SCAASGRTFSDYGMGWFRQAPGKEHEFVASINWSNARTSYADSAKGRFTISRDNAKNTGYLQMNSLRVEDTAVYYCA

[chemical structure]

DPEVQFNWYVDGVEVHNAKTKPREEQFNSTYRVVSVLTVLHQDWLNGKEYKCKVSNKGLPSSIEKTISKAKGQPRE
PQVYTLPPSQEEMTKNQVSLTCLVKGFYPSDIAVEWESNGQPENNYKTTPPVLDSDGSFFLYSRLTVDKSRWQEGN
VFSCSVMHEALHNHYTQKSLSLSLGK
ODY-1243
(SEQ ID NO: 4765)
DVQLLESGGGLVQPGGSLRLSCAASGRTESDYGMGWFROAPGKEHEFVASINWSNARTSYADSAKGRETISRDNAKN

[chemical structure]

SCAASGRTESDYGMGWFRQAPGKEHEFVASINWSNARTSYADSAKGRETISRDNAKNTGYLQMNSLRVEDTAVYYCA

[chemical structure]

EVKFNWYVDGVEVHNAKTKPREEQYNSTYRVVSVLTVLHQDWLNGKEYKCKVSNKALAAPIEKTISKAKGQPREPQ
VYTLPPSREEMTKNQVSLTCLVKGFYPSDIAVEWESNGQPENNYKTTPPVLDSDGSFFLYSKLTVDKSRWQQGNVFS
CSVMHEALHNHYTQKSLSLSPGK
ODY-1244
(SEQ ID NO: 4766)
EVQLLESGGGLVQPGGSLRLSCAASGRTFSDYGMGWFRQAPGKEHEFVASINWSNARTSYADSAKGRFTISRDNAKN

[chemical structure]

SCAASGRTFSDYGMGWFRQAPGKEHEFVASINWSNARTSYADSAKGRFTISRDNAKNTGYLQMNSLRVEDTAVYYCA

[chemical structure]

DPEVQFNWYVDGVEVHNAKTKPREEQFNSTYRVVSVLTVLHQDWLNGKEYKCKVSNKGLPSSIEKTISKAKGQPRE
PQVYTLPPSQEEMTKNQVSLTCLVKGFYPSDIAVEWESNGQPENNYKTTPPVLDSDGSFFLYSRLTVDKSRWQEGN
VFSCSVMHEALHNHYTQKSLSLSLGK
ODY-1245
(SEQ ID NO: 4767)
EVQLLESGGGLVQPGGSLRLSCAASGRTFSDYGMGWFROAPGKEHEFVASINWSNARTSYADSAKGRETISRDNAKN

[chemical structure]

SCAASGRTESDYGMGWFRQAPGKEHEFVASINWSNARTSYADSAKGRETISRDNAKNTGYLQMNSLRVEDTAVYYCA

[chemical structure]

PEVKFNWYVDGVEVHNAKTKPREEQYNSTYRVVSVLTVLHQDWLNGKEYKCKVSNKALAAPIEKTISKAKGQPREP
QVYTLPPSREEMTKNQVSLTCLVKGFYPSDIAVEWESNGQPENNYKTTPPVLDSDGSFFLYSKLTVDKSRWQQGNV
FSCSVMHEALHNHYTQKSLSLSPGK
ODY-1246
(SEQ ID NO: 4768)
DVQLLESGGGLVOPGGSLRLSCAASGRTESDYGMGWFROAPGKEHEFVASINWSNARTSYADSAKGRETISRDNAKN

[chemical structure]

LSCAASGRTESDYGMGWFRQAPGKEHEFVASINWSNARTSYADSAKGRFTISRDNAKNTGYLQMNSLRVEDTAVYYC

[chemical structure]

EDPEVQFNWYVDGVEVHNAKTKPREEQFNSTYRVVSVLTVLHQDWLNGKEYKCKVSNKGLPSSIEKTISKAKGQPR
EPQVYTLPPSQEEMTKNQVSLTCLVKGFYPSDIAVEWESNGQPENNYKTTPPVLDSDGSFFLYSRLTVDKSRWQEG
NVFSCSVMHEALHNHYTQKSLSLSLGK
ODY-1247
(SEQ ID NO: 4769)
DVQLLESGGGLVQPGGSLRLSCAASGRTESDYGMGWFRQAPGKEHEFVASINWSNARTSYADSAKGRFTISRDNAKN

[chemical structure]

LSCAASGRTESDYGMGWFRQAPGKEHEFVASINWSNARTSYADSAKGRETISRDNAKNTGYLOMNSLRVEDTAVYYC

[chemical structure]

DPEVKFNWYVDGVEVHNAKTKPREEQYNSTYRVVSVLTVLHQDWINGKEYKCKVSNKALAAPIEKTISKAKGQPRE
PQVYTLPPSREEMTKNQVSLTCLVKGFYPSDIAVEWESNGQPENNYKTTPPVLDSDGSFFLYSKLTVDKSRWQQGN
VFSCSVMHEALHNHYTQKSLSLSPGK
ODY-1248
(SEQ ID NO: 4770)
DVQLLESGGGLVQPGGSLRLSCAASGRTESDYGMGWFROAPGKEHEFVASINWSNARTSYADSAKGRETISRDNAKN

[chemical structure]

LSCAASGRTFSDYGMGWFROAPGKEHEFVASINWSNARTSYADSAKGRFTISRDNAKNTGYLQMNSLRVEDTAVYYC

[chemical structure]

EDPEVQFNWYVDGVEVHNAKTKPREEQFNSTYRVVSVLTVLHQDWLNGKEYKCKVSNKGLPSSIEKTISKAKGQPR
EPQVYTLPPSQEEMTKNQVSLTCLVKGFYPSDIAVEWESNGQPENNYKTTPPVLDSDGSFFLYSRLTVDKSRWQEG
NVFSCSVMHEALHNHYTQKSLSLSLGK

[0645] The present invention is not to be limited in scope by the specific embodiments described herein. Indeed, various modifications of the invention in addition to those described herein will become apparent to those skilled in the art from the foregoing description. Such modifications are intended to fall within the scope of the appended claims.

[0646] All patents, applications, publications, test methods, literature, and other materials cited herein are hereby incorporated by reference in their entirety as if physically present in this specification.

1. An antigen-binding protein that specifically binds tumor necrosis factor receptor 2 (TNFR2), comprising a complementarity determining region 3 (CDR3) comprising an amino acid sequence selected from
a).
(SEQ ID NO: 60)
(Y/F)YQ(S/A)LS(T/S)(P/A)N(Y/F)GQ(V/T)F;
b).
(SEQ ID NO: 61)
AADSDL(S/R)TV(V/T)VGPHDY;
c).
(SEQ ID NO: 62)
AKDAG(S/G)WG(T/R)GPFG(Y/F)(E/D)YDY;
d).
(SEQ ID NO: 63)
AA(T/A)PSGKAY(T/S)Y;
e).
(SEQ ID NO: 64)
ATPGPY(T/S/M)YCAPYGSSWSRGYDY;
f).
(SEQ ID NO: 65)
ARV(R/G)G(T/S/A)PY(E/D)Y(N/G)Y;
g).
(SEQ ID NO: 66)
(T/A/V)A(S/A)PTGRAF(T/N/A)Y;
h).
(SEQ ID NO: 42)
AGSAFDF;
i).
(SEQ ID NO: 67)
S(V/M)(V/L)GRDM(M/V)TY;
j).
(SEQ ID NO: 4063)
AVGDFEGELVLKGDY;
k).
(SEQ ID NO: 4517)
AAD(L/V)G(F/V/Y)LY(A/T/V)DYV(P/R)LH(M/T)HHFGS;
and
l).
(SEQ ID NO: 4771)
A(A/G)(T/A)(P/L)(S/T)GKAY(T/S)Y.

2. The antigen-binding protein of claim 1, wherein the CDR3 comprises an amino acid sequence selected from SEQ ID NOs: 3, 6, 10, 14, 18, 22, 26, 30, 34, 38, 42, 46, 4063, 4067, 4071, 4524 4530, and 4727-4730.

3. The antigen-binding protein of claim 1 or 2, further comprising a CDR1 comprising an amino acid sequence selected from
a).
(SEQ ID NO: 68)
GSI(V/F)(R/S)(T/A)(N/D)(S/G/A);
b).
(SEQ ID NO: 69)
GFT(F/L)DD(I/Y)A;
c).
(SEQ ID NO: 70)
GFTFS(S/R/G)YA;
d).
(SEQ ID NO: 16)
GRTFSDYG;
e).
(SEQ ID NO: 71)
G(L/F)TLDYYA;
f).
(SEQ ID NO: 72)
GF(T/N)FSMYS;
g).
(SEQ ID NO: 73)
GRTF(G/R/S)(N/S)(Y/L)(T/F);
h).
(SEQ ID NO: 40)
GASLSRNA;
i).
(SEQ ID NO: 74)
GS(I/T)FRFPP;
j).
(SEQ ID NO: 4061)
GFTLDDYA;
and
k).
(SEQ ID NO: 4519)
G(F/V)(S/T)LD(D/Y)(H/Y)T.

4. The antigen-binding protein of claim 3, wherein the CDR1 comprises an amino acid sequence selected from SEQ ID NOs: 1, 5, 8, 12, 16, 20, 24, 28, 32, 36, 40, 44, 4061, 4065, 4069, 4520, and 4719-4722.

5. The antigen-binding protein of any one of claims 1-4, further comprising a CDR2 comprising an amino acid sequence selected from
a).
(SEQ ID NO: 75)
IRSDGF(T/I);
b).
(SEQ ID NO: 76)
I(Y/F)SY(S/G)(S/P)NT;
c).
(SEQ ID NO: 77)
I(Y/S)(S/D)DGS(E/D)T;
d).
(SEQ ID NO: 4699)
INWSN(G/A)RT;
e).
(SEQ ID NO: 78)
I(S/N)(V/T)(S/G)DGST;
f).
(SEQ ID NO: 79)
IDT(R/G)GST;
g).
(SEQ ID NO: 80)
IR(W/R/Y)(T/P)G(G/L)(S/I)T;
h).
(SEQ ID NO: 41)
IYDDGET;
i).
(SEQ ID NO: 45)
LTSGGST;
j).
(SEQ ID NO: 4062)
IFSYSSNT;
and
k).
(SEQ ID NO: 4518)
I(N/S)SNDG(S/T)(T/V).

6. The antigen-binding protein of claim 5, wherein the CDR2 comprises an amino acid sequence selected from SEQ ID NOs: 2, 9, 13, 17, 21, 25, 29, 33, 37, 41, 45, 4062, 4066, 4070, 4527, and 4723-4726.

7. The antigen-binding protein of any one of claims 1, 3, and 5, wherein the antigen-binding protein comprises
i) a CDR1 comprising an amino acid sequence of SEQ ID NO: 68, a CDR2 comprising an amino acid sequence of SEQ ID NO: 75, and a CDR3 comprising an amino acid sequence of SEQ ID NO: 60;
ii) a CDR1 comprising an amino acid sequence of SEQ ID NO: 69, a CDR2 comprising an amino acid sequence of SEQ ID NO: 76, a CDR3 comprising an amino acid sequence of SEQ ID NO: 61;
iii) a CDR1 comprising an amino acid sequence of SEQ ID NO: 70, a CDR2 comprising an amino acid sequence of SEQ ID NO: 77, a CDR3 comprising an amino acid sequence of SEQ ID NO: 62;
iv) a CDR1 comprising an amino acid sequence of SEQ ID NO: 16, a CDR2 comprising an amino acid sequence of SEQ ID NO: 4699, a CDR3 comprising an amino acid sequence of SEQ ID NO: 63;
v) a CDR1 comprising an amino acid sequence of SEQ ID NO: 71, a CDR2 comprising an amino acid sequence of SEQ ID NO: 78, a CDR3 comprising an amino acid sequence of SEQ ID NO: 64;
vi) a CDR1 comprising an amino acid sequence of SEQ ID NO: 72, a CDR2 comprising an amino acid sequence of SEQ ID NO: 79, a CDR3 comprising an amino acid sequence of SEQ ID NO: 65;
vii) a CDR1 comprising an amino acid sequence of SEQ ID NO: 73, a CDR2 comprising an amino acid sequence of SEQ ID NO: 80, a CDR3 comprising an amino acid sequence of SEQ ID NO: 66;
viii) a CDR1 comprising an amino acid sequence of SEQ ID NO: 40, a CDR2 comprising an amino acid sequence of SEQ ID NO: 41, a CDR3 comprising an amino acid sequence of SEQ ID NO: 42; or
ix) a CDR1 comprising an amino acid sequence of SEQ ID NO: 74, a CDR2 comprising an amino acid sequence of SEQ ID NO: 45, a CDR3 comprising an amino acid sequence of SEQ ID NO: 67;
x) a CDR1 comprising an amino acid sequence of SEQ ID NO: 4061, a CDR2 comprising an amino acid sequence of SEQ ID NO: 4062, a CDR3 comprising an amino acid sequence of SEQ ID NO: 4063;
xi). a CDR1 comprising an amino acid sequence of SEQ ID NO: 4519, a CDR2 comprising an amino acid sequence of SEQ ID NO: 4518, a CDR3 comprising an amino acid sequence of SEQ ID NO: 4517; or
xii). a CDR1 comprising an amino acid sequence of SEQ ID NO: 16, a CDR2 comprising an amino acid sequence of SEQ ID NO: 4699, a CDR3 comprising an amino acid sequence of SEQ ID NO: 4771.

8. The antigen-binding protein of claim 7, wherein the antigen-binding protein comprises
a) a CDR1 comprising an amino acid sequence of SEQ ID NO: 69, a CDR2 comprising an amino acid sequence of SEQ ID NO: 76, a CDR3 comprising an amino acid sequence of SEQ ID NO: 61;
b) a CDR1 comprising an amino acid sequence of SEQ ID NO: 16, a CDR2 comprising an amino acid sequence of SEQ ID NO: 4699, a CDR3 comprising an amino acid sequence of SEQ ID NO: 63;
c) a CDR1 comprising an amino acid sequence of SEQ ID NO: 73, a CDR2 comprising an amino acid sequence of SEQ ID NO: 80, a CDR3 comprising an amino acid sequence of SEQ ID NO: 66; or
d) a CDR1 comprising an amino acid sequence of SEQ ID NO: 16, a CDR2 comprising an amino acid sequence of SEQ ID NO: 4699, a CDR3 comprising an amino acid sequence of SEQ ID NO: 4771.

9. The antigen-binding protein of any one of claims 1, 3, 5, and 7, wherein the antigen-binding protein comprise comprises
i) a CDR1 with an amino acid sequence of GSI(V/F)(R/S)(A/T)(N/D)(G/A) (SEQ ID NO: 4700), a CDR2 comprising an amino acid sequence of IRSDGFT (SEQ ID NO: 2), and a CDR3 comprising an amino acid sequence of YYQ(S/A)LSSPNYGQ(V/T)F (SEQ ID NO: 4701);
ii) a CDR1 with an amino acid sequence of GFTFDDIA (SEQ ID NO: 8), a CDR2 comprising an amino acid sequence of IYSYGPNT (SEQ ID NO: 9), and a CDR3 comprising an amino acid sequence of AADSDLSTVV(V/T)GPHDY (SEQ ID NO: 4702);
iii) a CDR1 with an amino acid sequence of GFTFSRYA (SEQ ID NO: 12), a CDR2 comprising an amino acid sequence of ISDDGSDT (SEQ ID NO: 13), and a CDR3 comprising an amino acid sequence of AKDAGSWGTGPFGYEYDY (SEQ ID NO: 14);
iv) a CDR1 with an amino acid sequence of GRTFSDYG (SEQ ID NO: 16), a CDR2 comprising an amino acid sequence of INWSN(G/A)RT (SEQ ID NO: 4699), and a CDR3 comprising an amino acid sequence of AA(T/A)PSGKAYSY (SEQ ID NO: 4703);
v) a CDR1 with an amino acid sequence of GLTLDYYA (SEQ ID NO: 20), a CDR2 comprising an amino acid sequence of ISTSDGST (SEQ ID NO: 21), and a CDR3 comprising an amino acid sequence of ATPGPYTYCAPYGSSWSRGYDY (SEQ ID NO: 22);
vi) a CDR1 with an amino acid sequence of GF(T/N)FSMYS (SEQ ID NO: 72), a CDR2 comprising an amino acid sequence of IDT(R/G)GST (SEQ ID NO: 79), and a CDR3 comprising an amino acid sequence of ARV(G/R)G(T/A)PYEY(N/G)Y (SEQ ID NO: 4704);
vii) a CDR1 with an amino acid sequence of GRTF(G/S)S(Y/L)(T/F) (SEQ ID NO: 4705), a CDR2 comprising an amino acid sequence of IR(W/R/Y)(T/P)G(G/L)(S/I)T (SEQ ID NO: 80), and a CDR3 comprising an amino acid sequence of (A/V)A(A/S)PTGRAF(T/N)Y (SEQ ID NO: 4707);
viii) a CDR1 with an amino acid sequence of GASLSRNA (SEQ ID NO: 40), a CDR2 comprising an amino acid sequence of IYDDGET (SEQ ID NO: 41), and a CDR3 comprising an amino acid sequence of AGSAFDF (SEQ ID NO: 42);
ix) a CDR1 with an amino acid sequence of GS(T/I)FRFPP (SEQ ID NO: 4708), a CDR2 comprising an amino acid sequence of LTSGGST (SEQ ID NO: 45), and a CDR3 comprising an amino acid sequence of SVLGRDM(M/V)TY (SEQ ID NO: 4706);
x) a CDR1 with an amino acid sequence of GFTLDDYA (SEQ ID NO: 4061), a CDR2 comprising an amino acid sequence of IFSYSSNT (SEQ ID NO: 4062), and a CDR3 comprising an amino acid sequence of AVGDFEGELVLKGDY (SEQ ID NO: 4063);
xi) a CDR1 with an amino acid sequence of GFTLDYYT (SEQ ID NO: 4065), a CDR2 comprising an amino acid sequence of ISSNDGSV (SEQ ID NO: 4066), and a CDR3 comprising an amino acid sequence of AADLGYLYVDYVRLHTHHFGS (SEQ ID NO: 4067); or
xii). a CDR1 with an amino acid sequence of GRTFSDYG (SEQ ID NO: 16), a CDR2 comprising an amino acid sequence of INWSN(G/A)RT (SEQ ID NO: 4699), and a CDR3 comprising an amino acid sequence of A(A/G)(T/A)(P/L)(S/T)GKAY(T/S)Y (SEQ ID NO: 4771).

10. The antigen-binding protein of claim 8 or claim 9, wherein the antigen-binding protein comprise comprises
a) a CDR1 with an amino acid sequence of GFTFDDIA (SEQ ID NO: 8), a CDR2 comprising an amino acid sequence of IYSYGPNT (SEQ ID NO: 9), and a CDR3 comprising an amino acid sequence of AADSDLSTVV(V/T)GPHDY (SEQ ID NO: 4702);
b) a CDR1 with an amino acid sequence of GRTFSDYG (SEQ ID NO: 16), a CDR2 comprising an amino acid sequence of INWSN(G/A)RT (SEQ ID NO: 4699), and a CDR3 comprising an amino acid sequence of AA(T/A)PSGKAYSY (SEQ ID NO: 4703);
c) a CDR1 with an amino acid sequence of GRTF(G/S)S(Y/L)(T/F) (SEQ ID NO: 4705), a CDR2 comprising an amino acid sequence of IR(W/R/Y)(T/P)G(G/L)(S/I)T (SEQ ID NO: 80), and a CDR3 comprising an amino acid sequence of (A/V)A(A/S)PTGRAF (T/NJY (SEQ ID NO: 4707); or
d). a CDR1 with an amino acid sequence of GRTFSDYG (SEQ ID NO: 16), a CDR2 comprising an amino acid sequence of INWSN(G/A)RT (SEQ ID NO: 4699), and a CDR3 comprising an amino acid sequence of A(A/G)(T/A)(P/L)(S/T)GKAY(T/S)Y (SEQ ID NO: 4771).

11. The antigen-binding protein of any one of claims 1-7 and 9, wherein the antigen-binding protein comprise
i) a CDR1 comprising an amino acid sequence of SEQ ID NO: 1, a CDR2 comprising an amino acid sequence of SEQ ID NO: 2, and a CDR3 comprising an amino acid sequence of SEQ ID NO: 3;
ii) a CDR1 comprising an amino acid sequence of SEQ ID NO: 5, a CDR2 comprising an amino acid sequence of SEQ ID NO: 2, a CDR3 comprising an amino acid sequence of SEQ ID NO: 6;
iii) a CDR1 comprising an amino acid sequence of SEQ ID NO: 8, a CDR2 comprising an amino acid sequence of SEQ ID NO: 9, a CDR3 comprising an amino acid sequence of SEQ ID NO: 10;
iv) a CDR1 comprising an amino acid sequence of SEQ ID NO: 12, a CDR2 comprising an amino acid sequence of SEQ ID NO: 13, a CDR3 comprising an amino acid sequence of SEQ ID NO: 14;
v) a CDR1 comprising an amino acid sequence of SEQ ID NO: 16, a CDR2 comprising an amino acid sequence of SEQ ID NO: 17, a CDR3 comprising an amino acid sequence of SEQ ID NO: 18;
vi) a CDR1 comprising an amino acid sequence of SEQ ID NO: 20, a CDR2 comprising an amino acid sequence of SEQ ID NO: 21, a CDR3 comprising an amino acid sequence of SEQ ID NO: 22;
vii) a CDR1 comprising an amino acid sequence of SEQ ID NO: 24, a CDR2 comprising an amino acid sequence of SEQ ID NO: 25, a CDR3 comprising an amino acid sequence of SEQ ID NO: 26;
viii) a CDR1 comprising an amino acid sequence of SEQ ID NO: 28, a CDR2 comprising an amino acid sequence of SEQ ID NO: 29, a CDR3 comprising an amino acid sequence of SEQ ID NO: 30;
ix) a CDR1 comprising an amino acid sequence of SEQ ID NO: 32, a CDR2 comprising an amino acid sequence of SEQ ID NO: 33, a CDR3 comprising an amino acid sequence of SEQ ID NO: 34;
x) a CDR1 comprising an amino acid sequence of SEQ ID NO: 36, a CDR2 comprising an amino acid sequence of SEQ ID NO: 37, a CDR3 comprising an amino acid sequence of SEQ ID NO: 38;
xi) a CDR1 comprising an amino acid sequence of SEQ ID NO: 40, a CDR2 comprising an amino acid sequence of SEQ ID NO: 41, a CDR3 comprising an amino acid sequence of SEQ ID NO: 42;
xii) a CDR1 comprising an amino acid sequence of SEQ ID NO: 44, a CDR2 comprising an amino acid sequence of SEQ ID NO: 45, a CDR3 comprising an amino acid sequence of SEQ ID NO: 46;
xiii) a CDR1 comprising an amino acid sequence of SEQ ID NO: 4061, a CDR2 comprising an amino acid sequence of SEQ ID NO: 4062, a CDR3 comprising an amino acid sequence of SEQ ID NO: 4063;
xiv). a CDR1 comprising an amino acid sequence of SEQ ID NO: 4065, a CDR2 comprising an amino acid sequence of SEQ ID NO: 4066, a CDR3 comprising an amino acid sequence of SEQ ID NO: 4067;
xv). a CDR1 comprising an amino acid sequence of SEQ ID NO: 4069, a CDR2 comprising an amino acid sequence of SEQ ID NO: 4070, a CDR3 comprising an amino acid sequence of SEQ ID NO: 4071;
xvi). a CDR1 comprising an amino acid sequence of SEQ ID NO: 4520, a CDR2 comprising an amino acid sequence of SEQ ID NO: 45, a CDR3 comprising an amino acid sequence of SEQ ID NO: 46;
xvii). a CDR1 comprising an amino acid sequence of SEQ ID NO: 8, a CDR2 comprising an amino acid sequence of SEQ ID NO: 9, a CDR3 comprising an amino acid sequence of SEQ ID NO: 4524;
xviii). a CDR1 comprising an amino acid sequence of SEQ ID NO: 16, a CDR2 comprising an amino acid sequence of SEQ ID NO: 4527, a CDR3 comprising an amino acid sequence of SEQ ID NO: 18;
xix). a CDR1 comprising an amino acid sequence of SEQ ID NO: 16, a CDR2 comprising an amino acid sequence of SEQ ID NO: 4527, a CDR3 comprising an amino acid sequence of SEQ ID NO: 4530;
xx). a CDR1 comprising an amino acid sequence of SEQ ID NO: 4719, a CDR2 comprising an amino acid sequence of SEQ ID NO: 4723, a CDR3 comprising an amino acid sequence of SEQ ID NO: 4727;
xxi). a CDR1 comprising an amino acid sequence of SEQ ID NO: 4720, a CDR2 comprising an amino acid sequence of SEQ ID NO: 4724, a CDR3 comprising an amino acid sequence of SEQ ID NO: 4728;
xxii). a CDR1 comprising an amino acid sequence of SEQ ID NO: 4721, a CDR2 comprising an amino acid sequence of SEQ ID NO: 4725, a CDR3 comprising an amino acid sequence of SEQ ID NO: 4729; or
xxiii). a CDR1 comprising an amino acid sequence of SEQ ID NO: 4722, a CDR2 comprising an amino acid sequence of SEQ ID NO: 4726, a CDR3 comprising an amino acid sequence of SEQ ID NO: 4730.

12. The antigen-binding protein of any one of claims 1-11, wherein the antigen-binding protein comprises
a) a CDR1 comprising an amino acid sequence of SEQ ID NO: 16, a CDR2 comprising an amino acid sequence of SEQ ID NO: 17, a CDR3 comprising an amino acid sequence of SEQ ID NO: 18;
b). a CDR1 comprising an amino acid sequence of SEQ ID NO: 16, a CDR2 comprising an amino acid sequence of SEQ ID NO: 4527, a CDR3 comprising an amino acid sequence of SEQ ID NO: 18;
c). a CDR1 comprising an amino acid sequence of SEQ ID NO: 16, a CDR2 comprising an amino acid sequence of SEQ ID NO: 4527, a CDR3 comprising an amino acid sequence of SEQ ID NO: 4530;
d) a CDR1 comprising an amino acid sequence of SEQ ID NO: 8, a CDR2 comprising an amino acid sequence of SEQ ID NO: 9, a CDR3 comprising an amino acid sequence of SEQ ID NO: 10;
e). a CDR1 comprising an amino acid sequence of SEQ ID NO: 8, a CDR2 comprising an amino acid sequence of SEQ ID NO: 9, a CDR3 comprising an amino acid sequence of SEQ ID NO: 4524;
f). a CDR1 comprising an amino acid sequence of SEQ ID NO: 4069, a CDR2 comprising an amino acid sequence of SEQ ID NO: 4070, a CDR3 comprising an amino acid sequence of SEQ ID NO: 4071;
g). a CDR1 comprising an amino acid sequence of SEQ ID NO: 4719, a CDR2 comprising an amino acid sequence of SEQ ID NO: 4723, a CDR3 comprising an amino acid sequence of SEQ ID NO: 4727;
h). a CDR1 comprising an amino acid sequence of SEQ ID NO: 4720, a CDR2 comprising an amino acid sequence of SEQ ID NO: 4724, a CDR3 comprising an amino acid sequence of SEQ ID NO: 4728;
i). a CDR1 comprising an amino acid sequence of SEQ ID NO: 4721, a CDR2 comprising an amino acid sequence of SEQ ID NO: 4725, a CDR3 comprising an amino acid sequence of SEQ ID NO: 4729; or
j). a CDR1 comprising an amino acid sequence of SEQ ID NO: 4722, a CDR2 comprising an amino acid sequence of SEQ ID NO: 4726, a CDR3 comprising an amino acid sequence of SEQ ID NO: 4730.

13. The antigen-binding protein of any one of claims 1-12, wherein the antigen-binding protein is a single-domain antibody.

14. The antigen-binding protein of claim 13, wherein the single-domain antibody is a VHH, a VNAR, or an engineered VH domain.

15. The antigen-binding protein of claim 14, wherein the VHH is a camelid VHH.

16. The antigen-binding protein of claim 15, wherein the VHH comprises an amino acid sequence selected from any one of SEQ ID NOs: 4, 7, 11, 15, 19, 23, 27, 31, 35, 39, 43, 47, 4064, 4068, 4072, 4521, 93-640, 4079-4125 2805-3363, 4359-4420, and 4605-4628, or a sequence having at least 75% identity thereto.

17. The antigen-binding protein of claim 15 or 16, wherein the VHH comprises an amino acid sequence selected from any one of SEQ ID NOs: 4, 7, 11, 15, 19, 23, 27, 31, 35, 39, 43, 47, 4064, 4068, 4072, and 4521, or a sequence having at least 75% identity thereto.

18. The antigen-binding protein of claim 14, wherein the VHH is a humanized VHH.

19. The antigen-binding protein of claim 18, wherein the humanized VHH comprises an amino acid sequence selected from any one of SEQ ID NOs: 81-92, 4076-4078, 4523, 4526, 4529, 4532, 4731-4734, 641-1127, and 4126-4172, or a sequence having at least 75% identity thereto.

20. The antigen-binding protein of claim 19, wherein the humanized VHH comprises an amino acid sequence selected from any one of SEQ ID NOs: 81-92, 4076-4078, 4523, 4526, 4529, 4731-4734, and 4532 or a sequence having at least 75% identity thereto.

21. The antigen-binding protein of any one of claims 1-20, wherein the antigen-binding protein has an agonist effect upon binding to TNFR2.

22. The antigen-binding protein of any one of claims 1-21, wherein the antigen-binding protein binds to human TNFR2.

23. The antigen-binding protein of claim 22, wherein the antigen-binding protein binds to human TNFR2 with a K_{D} of less than about 3×10⁻⁷ M.

24. The antigen-binding protein of claim 23, wherein the antigen-binding protein binds to human TNFR2 with a K_{D} of about 1×10⁻¹⁰ to 5×10⁻⁸ M.

25. The antigen-binding protein of any one of claims 1-10, wherein the antigen-binding protein binds to cyno TNFR2.

26. The antigen-binding protein of claim 25, wherein the antigen-binding protein binds to cyno TNFR2 with a K_{D} of less than about 3×10⁻⁷ M.

27. The antigen-binding protein of claim 26, wherein the antigen-binding protein binds to cyno TNFR2 with a K_{D} of about 1×10⁻⁹ to 2×10⁻⁷ M.

28. The antigen-binding protein of any one of claims 1-27, wherein the antigen-binding protein binds to the same epitope(s) as antibody clone MR2-1.

29. The antigen-binding protein of any one of claims 1-27, wherein the antigen-binding protein does not bind to the same epitope(s) as antibody clone MR2-1.

30. The antigen-binding protein of any one of claims 1-29, wherein the antigen-binding protein increases expression of one or more proteins selected from a protein in the NF-kB pathway, FOXP3, HELIOS, EZH2, HLA-DR, ICAM-1, OX-40, ICOS, and CCR8.

31. The antigen-binding protein of any one of claims 1-30, wherein the antigen-binding protein comprises one or more modifications that reduce binding of said antigen-binding protein by pre-existing antibodies found in human blood or serum.

32. A fusion protein that specifically binds tumor necrosis factor receptor 2 (TNFR2), comprising one or more of said antigen-binding proteins of any one of claims 1-31.

33. The fusion protein of claim 32, which comprises two said antigen-binding proteins.

34. The fusion protein of claim 32, which comprises four said antigen-binding proteins.

35. The fusion protein of any one of claims 32-34, wherein the one or more antigen-binding proteins bind to the same epitope on TNFR2.

36. The fusion protein of any one of claims 32-34, wherein the one or more antigen-binding proteins bind to different epitopes on TNFR2.

37. The fusion protein of any one of claims 32-36, wherein the one or more antigen-binding proteins are one or more single-domain antibodies.

38. The fusion protein of claim 37, wherein one or more single-domain antibodies are one or more VHHs.

39. The fusion protein of any one of claims 32-38, which further comprises an immunoglobulin Fc region.

40. The fusion protein of claim 39, wherein the immunoglobulin Fc region is an Fc region of a human immunoglobulin.

41. The fusion protein of claim 40, wherein the immunoglobulin Fc region is an Fc region of human IgG1, IgG2, IgG3 or IgG4, or a variant thereof.

42. The fusion protein of claim 41, wherein the immunoglobulin Fc region is an Fc region of human IgG1, or a variant thereof.

43. The fusion protein of claim 42, wherein the Fc region of human IgG1 comprises one or more mutations selected from L234A, L235A, G237A, D265A, N297A, and/or P329A according to EU numbering.

44. The fusion protein of claim 43, wherein the Fc region of human IgG1 comprises a set of mutations selected from
1. L234A and L235A;
2. L234A, L235A, and P329A;
3. D265A, N297A and P329A; and
4. L234A, L235A, and G237A.

45. The fusion protein of claim 41, wherein the immunoglobulin Fc region is an Fc region of human IgG4, or a variant thereof.

46. The fusion protein of claim 45, wherein the Fc region of human IgG4 comprises one or more mutations selected from S228P, L235E, L235A, and/or F234A according to EU numbering.

47. The fusion protein of claim 46, wherein the Fc region of human IgG4 comprises a set of mutations selected from
1. S228P and L235E;
2. S228P and L235A;
3. S228P, F234A, and L235E; and
4. S228P, F234A, and L235A.

48. The fusion protein of any one of claims 32-52, which further comprises a cytokine.

49. The fusion protein of claim 48, wherein the cytokine is IL-2, or a variant thereof.

50. The fusion protein of claim 49, wherein the cytokine is an IL-2 variant comprising a N88D mutation.

51. The fusion protein of any one of claims 32-50, which further comprises a moiety that binds to serum albumin.

52. The fusion protein of claim 32, which comprises the amino acid sequence of any one of SEQ ID Nos: 3933-3964, 4483-4513, 4686-4696, 4709-4716, and 4735-4770, or a sequence having at least 75% identity thereto.

53. A conjugate comprising the antigen-binding protein of any one of claims 1-31 or the fusion protein of any one of claims 32-52, wherein the antigen-binding protein or fusion protein is conjugated to a second moiety.

54. The conjugate of claim 53, wherein the second moiety is selected from a detectable label, a drug, a toxin, a radionuclide, an enzyme, an immunomodulatory agent, a cytokine, a cytotoxic agent, a chemotherapeutic agent, a diagnostic agent, or a combination thereof.

55. The conjugate of claim 54, wherein the second moiety is a cytokine.

56. The conjugate of claim 55, wherein the cytokine is IL-2, or a variant thereof.

57. The conjugate of claim 56, wherein the cytokine is IL-2 variant comprising a N88D mutation.

58. A polynucleotide molecule encoding the antigen-binding protein of any one of claims 1-31 or the fusion protein of any one of claims 32-52.

59. The polynucleotide molecule of claim 54, which comprises the nucleotide sequence of any one of SEQ ID NOs: 48-59, 4073-4075, 4522, 4525, 4528, 4531, 3364-3922, 4421-4482, and 4629-4652 or a sequence having at least 70% identity thereto.

60. The polynucleotide molecule of claim 59, which comprises the nucleotide sequence of any one of SEQ ID NOs: 48-59, 4073-4075, 4522, 4525, 4528, and 4531, or a sequence having at least 70% identity thereto.

61. A recombinant vector comprising the polynucleotide molecule of any one of claims 58-60.

62. A host cell comprising polynucleotide molecule of any one of claims 58-60, or the expression vector of claim 61.

63. A kit comprising the antigen-binding protein of any one of claims 1-31, the fusion protein of any one of claims 32-52, or the conjugate of any one of claims 53-57, the polynucleotide molecule of any one of claims 58-60, or the recombinant vector of claim 61, and optionally, instructions and/or packaging for the same.

64. A pharmaceutical composition comprising the antigen-binding protein of any one of claims 1-31, the fusion protein of any one of claims 32-52, or the conjugate of any one of claim 53-57, the polynucleotide molecule of any one of claims 58-60, or the recombinant vector of claim 61, and a pharmaceutically acceptable carrier and/or excipient.

65. A method for preparing an antigen-binding protein or a fusion protein that specifically binds tumor necrosis factor receptor 2 (TNFR2), comprising the steps of:
(a) culturing the host cell of claim 62 in a culture medium under conditions suitable for expression of the antigen-binding protein or fusion protein, and
(b) isolating the antigen-binding protein or fusion protein from the host cell and/or culture medium.

66. A method for promoting proliferation, activating and/or enhancing suppressive function, and/or stabilizing immunosuppressive phenotype of a population of regulatory T cells (Treg) comprising contacting the population of regulatory T cells with the antigen-binding protein of claim 1-31, the fusion protein of any one of claims 32-52, or the conjugate of any one of claim 53-57.

67. The method of claim 66, wherein said contacting occurs in vitro.

68. The method of claim 66, wherein said contacting occurs in vivo.

69. The method of claim 68, wherein the method further comprises administering the antigen-binding protein, the fusion protein, or the conjugate into a subject in need thereof.

70. A method of treating or preventing a disease or disorder in a subject in need thereof, said method comprising administering to the subject the antigen-binding protein of claim 1-31, the fusion protein of any one of claims 32-52, or the conjugate of any one of claim 53-57.

71. The method of claim 70, wherein the disease or disorder is an immunological disease, inflammatory disease, cancer, cardiovascular disease, or an infertility and pregnancy-associated disease.

72. The method of claim 71, wherein the immunological disease is selected from an autoimmune disease, a neurological condition, an allergy, asthma, macular degeneration, muscular atrophy, a disease related to miscarriage, atherosclerosis, bone loss, a musculoskeletal disease, obesity, a graft-versus-host disease, and an allograft rejection.

73. The method of claim 72, wherein the autoimmune disease is selected from lupus, alopecia areata, ankylosing spondylitis, antiphospholipid syndrome, autoimmune Addison's disease, autoimmune hemolytic anemia, autoimmune hepatitis, Behcet's disease, bullous pemphigoid, cardiomyopathy, celiac sprue-dermatitis, chronic fatigue immune dysfunction syndrome (CFIDS), chronic inflammatory demyelinating polyneuropathy, Churg-Strauss syndrome, cicatricial pemphigoid, CREST syndrome, cold agglutinin disease, Crohn's disease, essential mixed cryoglobulinemia, fibromyalgia-fibromyositis, Goodpastures disease, Graves' disease, Guillain-Barré, Hashimoto's thyroiditis, hypothyroidism, idiopathic pulmonary fibrosis, idiopathic thrombocytopenia purpura (ITP), IgA nephropathy, juvenile arthritis, lichen planus, lichen sclerosis, IgG4-related disease, Meniere's disease, mixed connective tissue disease, multiple sclerosis, myasthenia gravis, neuromyelitis optica spectrum disease, pemphigus vulgaris or related blistering skin disease, pernicious anemia, polyarteritis nodosa, polychondritis, polyglandular syndromes, polymyalgia rheumatica, polymyositis and dermatomyositis, premature ovarian failure, primary agammaglobulinemia, primary biliary cirrhosis, psoriasis, primary ovarian insufficiency, Raynaud's phenomenon, Reiter's syndrome, rheumatic fever, rheumatoid arthritis, sarcoidosis, scleroderma, Sjögren's syndrome, spondyloarthritis, stiff-man syndrome, type I diabetes, Takayasu arteritis, temporal arteritis/giant cell arteritis, ulcerative colitis, uveitis, vasculitis, vitiligo, and Wegener's granulomatosis (Granulomatosis with polyanglitis) or other immune vasculitis.

74. The method of claim 73, wherein the lupus is systemic lupus erythematosus (SLE), cutaneous lupus, lupus nephritis, neonatal lupus, or drug-induced lupus.

75. The method of claim 74, wherein the cutaneous lupus is acute cutaneous lupus, chronic cutaneous lupus erythematosus, discoid lupus erythematosus (DLE), or subacute cutaneous lupus erythematosus.

76. The method of claim 72, wherein the neurological condition is selected from a brain tumor, a brain metastasis, a spinal cord injury, schizophrenia, epilepsy, Amyotrophic lateral sclerosis (ALS), Alzheimer's disease, Huntington's disease, Parkinson's disease, and stroke.

77. The method of claim 72, wherein the allergy is selected from food allergy, seasonal allergy, pet allergy, hives, hay fever, allergic conjunctivitis, poison ivy allergy oak allergy, mold allergy, drug allergy, dust allergy, cosmetic allergy, and chemical allergy.

78. The method of claim 72, wherein the allograft rejection is selected from skin graft rejection, bone graft rejection, vascular tissue graft rejection, ligament graft rejection, and organ graft rejection.

79. The method of claim 72, wherein the ligament graft rejection is selected from cricothyroid ligament graft rejection, caudal cruciate ligament graft rejection, periodontal ligament graft rejection, suspensory ligament of the lens graft rejection, palmar radiocarpal ligament graft rejection, dorsal radiocarpal ligament graft rejection, ulnar collateral ligament graft rejection, radial collateral ligament graft rejection, suspensory ligament of the breast graft rejection, anterior sacroiliac ligament graft rejection, posterior sacroiliac ligament graft rejection, sacrotuberous ligament graft rejection, sacrospinous ligament graft rejection, inferior pubic ligament graft rejection, superior pubic ligament graft rejection, anterior cruciate ligament graft rejection, lateral collateral ligament graft rejection, posterior cruciate ligament graft rejection, medial collateral ligament graft rejection, cranial cruciate ligament graft rejection, and patellar ligament graft rejection.

80. The method of claim 72, wherein the organ graft rejection is selected from heart graft rejection, lung graft rejection, kidney graft rejection, liver graft rejection, pancreas graft rejection, intestine graft rejection, and thymus graft rejection.

81. The method of claim 72, wherein the graft-versus-host disease arises from a bone marrow transplant or one or more blood cells selected from B-cells, T-cells, basophils, common myeloid progenitor cells, common lymphoid progenitor cells, dendritic cells, eosinophils, hematopoietic stem cells, neutrophils, natural killer cells, megakaryocytes, monocytes, or macrophages.

82. The method of claim 72, wherein the inflammatory disease is acute or chronic inflammation.

83. The method of claim 72, wherein the inflammatory disease is selected from osteoarthritis, atopic dermatitis, endometriosis, polycystic ovarian syndrome, inflammatory bowel disease, fibrotic lung disease, and cardiac inflammation.

84. The method of claim 72, wherein the cancer is selected from adenoid cystic carcinoma, adrenal gland tumor, amyloidosis, anal cancer, appendix cancer, astrocytoma, ataxia-telangiectasia, Beckwith-Wiedemann syndrome, bile duct cancer (cholangiocarcinoma), Birt-Hogg-Dubé syndrome, bladder cancer, bone cancer (sarcoma of bone), brain stem glioma, brain tumor, breast cancer, inflammatory breast cancer, metastatic breast cancer, male breast cancer, Carney complex, central nervous system tumors (brain and spinal cord), cervical cancer, childhood cancer, colorectal cancer, Cowden syndrome, craniopharyngioma, desmoid tumor, desmoplastic infantile ganglioglioma, childhood tumor, ependymoma, esophageal cancer, Ewing sarcoma, eye cancer, eyelid cancer, familial adenomatous polyposis, familial GIST, familial malignant melanoma, familial pancreatic cancer, gallbladder cancer, gastrointestinal stromal tumor (GIST), germ cell tumor, gestational trophoblastic disease, head and neck cancer, hereditary breast and ovarian cancer, hereditary diffuse gastric cancer, hereditary leiomyomatosis and renal cell cancer, hereditary mixed polyposis syndrome, hereditary pancreatitis, hereditary papillary renal carcinoma, HIV/AIDS-related cancer, juvenile polyposis syndrome, kidney cancer, lacrimal gland tumor, laryngeal and hypopharyngeal cancer, acute lymphoblastic leukemia (ALL), acute myeloid leukemia (AML), B-cell prolymphocytic leukemia and hairy cell leukemia, chronic lymphocytic leukemia (CLL), chronic myeloid leukemia (CML), chronic T-cell lymphocytic leukemia, eosinophilic leukemia, Li-Fraumeni syndrome, liver cancer, lung cancer, non-small cell lung cancer, small cell lung cancer, hodgkin lymphoma, non-hodgkin lymphoma, lynch syndrome, mastocytosis, medulloblastoma, melanoma, meningioma, mesothelioma, multiple endocrine neoplasia type 1, multiple endocrine neoplasia type 2, multiple myeloma, MUTYH (or MYH)-associated polyposis, myelodysplastic syndromes (MDS), nasal cavity and paranasal sinus cancer, nasopharyngeal cancer, neuroblastoma, neuroendocrine tumor of the gastrointestinal tract, neuroendocrine tumor of the lung, neuroendocrine tumor of the pancreas, neuroendocrine tumors, neurofibromatosis type 1, neurofibromatosis type 2, nevoid basal cell carcinoma syndrome, oral and oropharyngeal cancer, osteosarcoma, ovarian, fallopian tube, and peritoneal cancer, pancreatic cancer, parathyroid cancer, penile cancer, Peutz-Jeghers syndrome, pheochromocytoma and paraganglioma, pituitary gland tumor, pleuropulmonary blastoma, prostate cancer, retinoblastoma, rhabdomyosarcoma, salivary gland cancer, Kaposi sarcoma, soft tissue sarcomas, skin cancer (non-melanoma), small bowel cancer, stomach cancer, testicular cancer, thymoma and thymic carcinoma, thyroid cancer, tuberous sclerosis complex, uterine cancer, vaginal cancer, Von Hippel-Lindau syndrome, vulvar cancer, Waldenstrom macroglobulinemia (lymphoplasmacytic lymphoma), Werner syndrome, Wilms tumor, or xeroderma pigmentosum.

85. The method of claim 72, wherein the cardiovascular disease is selected from atherosclerosis, heart failure, left heart failure with reduced ejection fraction, left heart failure with preserved ejection fraction, right ventricular failure, congestive heart failure, restrictive cardiomyopathy, dilated cardiomyopathy, hypertrophic cardiomyopathy, ischemic cardiomyopathy, idiopathic cardiomyopathy, and hypertension.

86. The method of claim 72, wherein the infertility and pregnancy-associated diseases is selected from recurrent pregnancy loss, pre-eclampsia, preterm labor, fetal growth restriction, or intrauterine growth restriction.

87. A method of regenerating a tissue or organ comprising one or more TNFR2+ cells, said method comprising contacting the tissue or organ with an effective amount of the antigen-binding protein of claim 1-31, the fusion protein of any one of claims 32-52, or the conjugate of any one of claim 53-57.

88. The method of claim 87, wherein said tissue or organ is selected from pancreas, salivary gland, pituitary gland, kidney, heart, lung, hematopoietic system, cranial nerves, heart, aorta, olfactory gland, ear, nerve, eye, thymus, tongue, bone, liver, small intestine, large intestine, gastrointestinal, lung, brain, skin, peripheral nervous system, central nervous system, spinal cord, breast, embryonic structures, embryo, and testes tissue.

89. The method of claim 87 or 88, wherein said contacting occurs in vitro.

90. The method of claim 87 or 88, wherein said contacting occurs in vivo.

91. The method of claim 90, wherein the method further comprises administering the antigen-binding protein, the fusion protein, or the conjugate into a subject in need thereof.

92. A method for inducing tolerance to a foreign agent and/or preventing or reducing immune response to a foreign agent in a subject in need thereof, said method comprising administering to the subject the antigen-binding protein of claim 1-31, the fusion protein of any one of claims 32-52, or the conjugate of any one of claim 53-57.

93. The method of claim 92, wherein the foreign agent is a therapeutic protein or peptide, a viral vector, a bacterial vector, a fungal vector, a biochemical vector, a lipid, carbohydrate, a nucleic acid, a sperm, an oocyte, or an embryo.

94. The method of claim 93, wherein the viral vector is a DNA or RNA vector.

95. The method of any one of claims 69-83 and 91-94, wherein the subject is a mammal.

96. The method of claim 95, wherein the mammal is human.

The application's sequence listing, which the Patent Office published only in electronic form, follows.

SEQUENCE LISTING (4771 sequences)

SEQ ID NO: 1 - protein, 8 aa, synthetic construct
GSIFRADA

SEQ ID NO: 2 - protein, 7 aa, synthetic construct
IRSDGFT

SEQ ID NO: 3 - protein, 14 aa, synthetic construct
YYQSLSSPNYGQVF

SEQ ID NO: 4 - protein, 120 aa, synthetic construct
EVQLVESGGGLVQAGGSLRVSCAASGSIFRADAMGWHRQVPGKPREFVAGIRSDGFTNYAEAVKGRFTISWDTVKNTVYLQMNSLKPEDTAVYTCYYQSLSSPNYGQVFWGQGTQVTVSS

SEQ ID NO: 5 - protein, 8 aa, synthetic construct
GSIVSTNG

SEQ ID NO: 6 - protein, 14 aa, synthetic construct
YYQALSSPNYGQTF

SEQ ID NO: 7 - protein, 120 aa, synthetic construct
EVQLVESGGGLVQAGGSLRLSCAASGSIVSTNGMGWHRQVPGKGRELVAGIRSDGFTNYADSVKGRFTISSDNVKNTVYLQMNSLKAEDSGVYFCYYQALSSPNYGQTFWGQGTQVTVSS

SEQ ID NO: 8 - protein, 8 aa, synthetic construct
GFTFDDIA

SEQ ID NO: 9 - protein, 8 aa, synthetic construct
IYSYGPNT

SEQ ID NO: 10 - protein, 16 aa, synthetic construct
AADSDLSTVVVGPHDY

SEQ ID NO: 11 - protein, 123 aa, synthetic construct
EVQLVESGGGLVQPGGSLRLSCAASGFTFDDIAMTWVRQAPGKGLEWVSSIYSYGPNTYYADSVKGRFTISTDSAKNTLYLQMNSLKPEDTAVYYCAADSDLSTVVVGPHDYWGQGTQVTVSS

SEQ ID NO: 12 - protein, 8 aa, synthetic construct
GFTFSRYA

SEQ ID NO: 13 - protein, 8 aa, synthetic construct
ISDDGSDT

SEQ ID NO: 14 - protein, 18 aa, synthetic construct
AKDAGSWGTGPFGYEYDY

SEQ ID NO: 15 - protein, 125 aa, synthetic construct
EVQLVESGGGLAQPGGSLRLSCAASGFTFSRYAMSWARQAPGKGLEWVSGISDDGSDTYYADSVKGRFTISRDNAKNTVYLQMNSLKPEDTALYYCAKDAGSWGTGPFGYEYDYWGQGTQVTVSS

SEQ ID NO: 16 - protein, 8 aa, synthetic construct
GRTFSDYG

SEQ ID NO: 17 - protein, 8 aa, synthetic construct
INWSNGRT

SEQ ID NO: 18 - protein, 11 aa, synthetic construct
AATPSGKAYSY

SEQ ID NO: 19 - protein, 118 aa, synthetic construct
EVQLVESGGGLVQAGGSLRLSCAASGRTFSDYGMGWFRQAPGKDSEFVAAINWSNGRTNYADSVKGRFTISRDNAKNTGYLEMNSLKVEDTAVYYCAATPSGKAYSYWGQGTQVTVSS

SEQ ID NO: 20 - protein, 8 aa, synthetic construct
GLTLDYYA

SEQ ID NO: 21 - protein, 8 aa, synthetic construct
ISTSDGST

SEQ ID NO: 22 - protein, 22 aa, synthetic construct
ATPGPYTYCAPYGSSWSRGYDY

SEQ ID NO: 23 - protein, 129 aa, synthetic construct
EVQLVESGGGLVQPGGSLRLSCAASGLTLDYYAIGWFRQAPGKEREGVSCISTSDGSTYYTDSVKGRFTISRDNAKNTVYLQMNSLKPEDTAVYYCATPGPYTYCAPYGSSWSRGYDYWGQGTQVTVSS

SEQ ID NO: 24 - protein, 8 aa, synthetic construct
GFTFSMYS

SEQ ID NO: 25 - protein, 7 aa, synthetic construct
IDTRGST

SEQ ID NO: 26 - protein, 12 aa, synthetic construct
ARVGGAPYEYNY

SEQ ID NO: 27 - protein, 118 aa, synthetic construct
EVQLVESGGGLVQPGGSLRLSCAASGFTFSMYSMSWVRQAPGKGPEWVSAIDTRGSTRYADSVKGRFTISRDNAKNTLYLQMDSLKPEDTALYYCARVGGAPYEYNYRGQGTQVTVSS

SEQ ID NO: 28 - protein, 8 aa, synthetic construct
GFNFSMYS

SEQ ID NO: 29 - protein, 7 aa, synthetic construct
IDTGGST

SEQ ID NO: 30 - protein, 12 aa, synthetic construct
ARVRGTPYEYGY

SEQ ID NO: 31 - protein, 118 aa, synthetic construct
EVQLVESGGGLVQPGGSLRLSCAASGFNFSMYSMSWVRQAPGKGPEWVSAIDTGGSTRYADSVKGRFTISRDNAKNTLYLQMDSLKPEDTALYYCARVRGTPYEYGYRGQGTQVTVSS

SEQ ID NO: 32 - protein, 8 aa, synthetic construct
GRTFGSYT

SEQ ID NO: 33 - protein, 8 aa, synthetic construct
IRRTGGST

SEQ ID NO: 34 - protein, 11 aa, synthetic construct
AAAPTGRAFTY

SEQ ID NO: 35 - protein, 118 aa, synthetic construct
EVQLVESGGGLVEAGGSLRLSCAASGRTFGSYTMGWFRQAPGREQEFLASIRRTGGSTSYADSVKGRFTISRDNAKKAVYLQMNSLKPEDTAVYYCAAAPTGRAFTYWGQGTQVTVSS

SEQ ID NO: 36 - protein, 8 aa, synthetic construct
GRTFSSLF

SEQ ID NO: 37 - protein, 8 aa, synthetic construct
IRYPGLIT

SEQ ID NO: 38 - protein, 11 aa, synthetic construct
AAAPTGRAFNY

SEQ ID NO: 39 - protein, 118 aa, synthetic construct
EVQLVESGGGLVQAGGSLRLSCLASGRTFSSLFMGWFRQAPGKEREFVASIRYPGLITNYADSAKGRFIISRDSAKNTVYLQMDSLKPEDTGLYSCAAAPTGRAFNYWGLGTQVTVSS

SEQ ID NO: 40 - protein, 8 aa, synthetic construct
GASLSRNA

SEQ ID NO: 41 - protein, 7 aa, synthetic construct
IYDDGET

SEQ ID NO: 42 - protein, 7 aa, synthetic construct
AGSAFDF

SEQ ID NO: 43 - protein, 113 aa, synthetic construct
EVQLVESGGGSVQPGGSLRLLCAVSGASLSRNAIIWVRQTPEKGLEWVSTIYDDGETYYRDSVKGRFTISRDLAENTVHLQMGNLQAEDTAVYYCAGSAFDFWGRGTQVTVSS

SEQ ID NO: 44 - protein, 8 aa, synthetic construct
GSTFRFPP

SEQ ID NO: 45 - protein, 7 aa, synthetic construct
LTSGGST

SEQ ID NO: 46 - protein, 10 aa, synthetic construct
SVLGRDMMTY

SEQ ID NO: 47 - protein, 116 aa, synthetic construct
EVQLVESGGGLVQAGGSLRLSCAASGSTFRFPPMGWYRQAPGKQREQVAQLTSGGSTNYADSVKGRFTISRDNAKNTWYLQMSSLRPEDTAVYYCSVLGRDMMTYWGQGTQVTVSS

SEQ ID NO: 48 - DNA, 360 bp, synthetic construct
  source 1..360: mol_type = other DNA
gaggtgcagctggtggagtctgggggaggcttggtgcaggctggggggtctctgagagtctcctgtgcagcctctggaagcatcttcagggccgatgccatgggctggcaccgccaggttccagggaagccgcgcgagtttgtcgcgggtattcgtagtgatggatttaccaactatgcggaggccgtgaagggccgattcaccatctcctgggataccgtcaagaacacggtgtatctgcagatgaacagcctgaaacctgaggacacagccgtctatacttgttattatcaatccctcagtagtcctaattacggtcaagtcttctggggccaggggacccaggtcaccgtctcctca

SEQ ID NO: 49 - DNA, 360 bp, synthetic construct
  source 1..360: mol_type = other DNA
gaggtgcagctggtggagtctgggggaggcttggtgcaggctggggggtctctgagactctcctgtgcagcctctggaagcatcgtcagtacgaatggcatgggatggcaccgccaggttccagggaagggccgcgagttggtcgcaggtattcgtagtgatggatttacaaactatgcggactccgtgaagggccgattcaccatctccagcgataacgtcaagaacacggtgtatctgcagatgaacagcctgaaagctgaggactcaggcgtctatttttgttattatcaagccctcagttctcctaattacggccaaaccttctggggccaggggacccaggtcaccgtctcctca

SEQ ID NO: 50 - DNA, 369 bp, synthetic construct
  source 1..369: mol_type = other DNA
gaggtgcagctggtggagtctgggggaggcttggtgcagcctgggggttctctgagactctcctgtgcagcctctggattcacttttgatgatattgccatgacctgggtccgacaggctccagggaaggggctggagtgggtgtccagtatttatagttacgggccaaacacatactatgcagactccgtgaagggccgattcaccatctccacagacagcgccaagaacacactgtatctgcaaatgaacagcctgaaacctgaggacacggccgtgtattactgtgcagcagattcagacctaagtacagtagtagttggtccccatgactactggggccaggggacccaggtcaccgtctcctca

SEQ ID NO: 51 - DNA, 375 bp, synthetic construct
  source 1..375: mol_type = other DNA
gaggtgcagctggtggagtctgggggaggcttggcgcagcctggggggtctctgagactctcctgtgcagcctctggattcaccttcagtcgctatgccatgagctgggcccgccaggctccaggaaaggggctcgaatgggtgtccggtatttctgatgatggcagtgacacatactatgcagactccgtgaagggccgattcaccatctccagagacaacgccaagaacacggtgtatctgcaaatgaacagcctgaaacctgaggacacggcactgtattactgtgcaaaagacgcggggagttggggtacgggtccctttggctatgagtatgactactggggccaggggacccaggtcaccgtctcctca

SEQ ID NO: 52 - DNA, 354 bp, synthetic construct
  source 1..354: mol_type = other DNA
gaggtgcagctggtggagtctgggggaggattggtgcaggctgggggctctctgagactctcctgtgcagcctctggacgcacctttagtgactatggcatgggctggttccgccaggctccagggaaggatagtgagtttgtagcggcgattaactggagtaatggtcgcacaaactatgcagactccgtgaagggccgattcaccatctccagagacaacgccaagaacacggggtatctggaaatgaacagcctgaaagttgaggacacggccgtttattactgtgcagcaaccccctccggaaaggcgtatagctactggggccaggggacccaggtcaccgtctcctca

SEQ ID NO: 53 - DNA, 387 bp, synthetic construct
  source 1..387: mol_type = other DNA
gaagtccaattagtagagtctggtggcggtctggtccagcctggcggttctttgcgcctcagctgcgccgcatccggtttaaccctggattattatgcaataggatggtttcgtcaagctccgggcaaagagcgggaaggcgtatcatgtatttcaacatccgatgggtctacttactacaccgacagcgttaagggacgcttcacaatctcgcgtgataacgctaaaaatacagtttatcttcagatgaatagtctgaaacccgaagacactgcggtgtactattgcgcgacgcctggcccatatacttactgtgccccgtatggaagctcatggagtagaggttatgattattgggggcaggggacgcaggtgaccgtttcgagt

SEQ ID NO: 54 - DNA, 354 bp, synthetic construct
  source 1..354: mol_type = other DNA
gaagttcagttggtcgagtcgggtgggggattagtacagccagggggctctctccgcctgtcatgtgcagcatcgggctttacttttagcatgtatagtatgagctgggtccgacaggcccccggtaaaggcccggagtgggtgtctgccattgatacacgtggatccactcggtatgctgacagtgtgaaaggccgtttcaccatctccagagacaatgcaaaaaacacgttataccttcagatggatagcctgaagcctgaagataccgcgctgtactattgcgctcgtgttggtggagcgccgtatgaatacaattatcgcggtcaaggtacacaagtaaccgtttcatct

SEQ ID NO: 55 - DNA, 354 bp, synthetic construct
  source 1..354: mol_type = other DNA
gaagtccaactggtagagagcggtggcggactggtgcaaccgggtggtagtttacgcttgtcttgcgcagcttccggattcaatttttctatgtattcaatgtcatgggtgcggcaggcgccaggcaaagggcctgaatgggtttcggccattgatactggcgggtctacacgttatgcggacagtgtcaaaggtcgttttaccatcagcagagacaacgctaagaatacactctatcttcagatggatagcttaaaacccgaggataccgcactgtactattgtgcccgtgttcgaggcacgccgtacgaatatggataccgcggtcagggcactcaggttaccgtatcctcg

SEQ ID NO: 56 - DNA, 354 bp, synthetic construct
  source 1..354: mol_type = other DNA
gaggtgcagctggtggagtctgggggaggattggtggaggctgggggttctctgagactctcctgtgcagcctctggacgcaccttcgggagctataccatgggctggttccgccaggctccaggaagggagcaagagtttttagcgagtattaggcggactggtggtagcacaagttatgcagactccgtgaagggccgattcaccatctccagagacaacgccaagaaggcggtgtatctgcaaatgaacagcctgaaacctgaggacacggccgtttattactgtgcagcagcccccaccgggagagcgtttacctactggggccaggggacccaggtcaccgtctcctca

SEQ ID NO: 57 - DNA, 354 bp, synthetic construct
  source 1..354: mol_type = other DNA
gaggtccaattggttgaatctggcggtggtttagtacaggcaggtggatccctgagactctcgtgtttggccagcggccggacttttagttccctgttcatggggtggtttcgccaggcccccgggaaggaacgagagtttgtcgcgagtatacgttatcctggtctgattacaaattacgccgatagcgcgaaaggccgttttatcatttcacgtgattctgcaaaaaatacggtgtatcttcagatggactcgcttaaaccggaagatactggtctgtactcttgcgcagcggctccaaccggccgcgctttcaactattggggattaggaacccaagttacagtgtcaagc

SEQ ID NO: 58 - DNA, 339 bp, synthetic construct
  source 1..339: mol_type = other DNA
gaagtgcagctggttgagagcggtggtggatcggtgcagcctggcggctctttacgattactctgcgccgtttccggagcgagcttgtctcgcaatgcaatcatttgggtgagacagacaccggaaaagggtctggagtgggtcagtacgatctatgatgacggcgagacatattatcgcgattcagttaaagggcgttttaccatttcccgtgatcttgcagaaaatacggttcatctgcaaatggggaacctgcaggcggaagacactgccgtatactactgtgctggtagtgctttcgatttttggggacggggcacccaagtcactgtatcaagc

SEQ ID NO: 59 - DNA, 348 bp, synthetic construct
  source 1..348: mol_type = other DNA
gaagttcaactggtggaaagtggcggtggcttggttcaggctgggggaagtctgcgtttatcgtgtgccgcttctggatccacgtttcgttttccgcctatgggttggtatcgacaggcacccgggaagcagagagaacaagtcgcgcagctcacgtcaggtggtagcaccaactatgccgactctgtgaaaggccggttcactatttcccgtgataatgcgaaaaatacatggtatcttcaaatgtcttcattacgcccagaggatactgcagtgtactattgcagcgtcctgggccgcgatatgatgacatactgggggcagggtacccaggttaccgtatcgagc

SEQ ID NO: 60 - protein, 14 aa, synthetic construct
  VARIANT 1: note = Y or F
  VARIANT 4: note = S or A
  VARIANT 7: note = T or S
  VARIANT 8: note = P or A
  VARIANT 10: note = Y or F
  VARIANT 13: note = V or T
XYQXLSXXNXGQXF

SEQ ID NO: 61 - protein, 16 aa, synthetic construct
  VARIANT 7: note = S or R
  VARIANT 10: note = V or T
AADSDLXTVXVGPHDY

SEQ ID NO: 62 - protein, 18 aa, synthetic construct
  VARIANT 6: note = S or G
  VARIANT 9: note = T or R
  VARIANT 14: note = Y or F
  VARIANT 15: note = E or D
AKDAGXWGXGPFGXXYDY

SEQ ID NO: 63 - protein, 11 aa, synthetic construct
  VARIANT 3: note = T or A
  VARIANT 10: note = T or S
AAXPSGKAYXY

SEQ ID NO: 64 - protein, 22 aa, synthetic construct
  VARIANT 7: note = T, S, or M
ATPGPYXYCAPYGSSWSRGYDY

SEQ ID NO: 65 - protein, 12 aa, synthetic construct
  VARIANT 4: note = R or G
  VARIANT 6: note = T, S, or A
  VARIANT 9: note = E or D
  VARIANT 11: note = N or G
ARVXGXPYXYXY

SEQ ID NO: 66 - protein, 11 aa, synthetic construct
  VARIANT 1: note = T, A, or V
  VARIANT 3: note = S or A
  VARIANT 10: note = T, N, or A
XAXPTGRAFXY

SEQ ID NO: 67 - protein, 10 aa, synthetic construct
  VARIANT 2: note = V or M
  VARIANT 3: note = V or L
  VARIANT 8: note = M or V
SXXGRDMXTY

SEQ ID NO: 68 - skipped

SEQ ID NO: 69 - protein, 8 aa, synthetic construct
  VARIANT 4: note = F or L
  VARIANT 7: note = I or Y
GFTXDDXA

SEQ ID NO: 70 - protein, 8 aa, synthetic construct
  VARIANT 6: note = S, R, or G
GFTFSXYA

SEQ ID NO: 71 - protein, 8 aa, synthetic construct
  VARIANT 2: note = L or F
GXTLDYYA

SEQ ID NO: 72 - protein, 8 aa, synthetic construct
  VARIANT 3: note = T or N
GFXFSMYS

SEQ ID NO: 73 - protein, 8 aa, synthetic construct
  VARIANT 5: note = G, R, or S
  VARIANT 6: note = N or S
  VARIANT 7: note = Y or L
  VARIANT 8: note = T or F
GRTFXXXX

SEQ ID NO: 74 - protein, 8 aa, synthetic construct
  VARIANT 3: note = I or T
GSXFRFPP

SEQ ID NO: 75 - protein, 7 aa, synthetic construct
  VARIANT 7: note = T or I
IRSDGFX

SEQ ID NO: 76 - protein, 8 aa, synthetic construct
  VARIANT 2: note = Y or F
  VARIANT 5: note = S or G
  VARIANT 6: note = S or P
IXSYXXNT

SEQ ID NO: 77 - protein, 8 aa, synthetic construct
  VARIANT 2: note = Y or S
  VARIANT 3: note = S or D
  VARIANT 7: note = E or D
IXXDGSXT

SEQ ID NO: 78 - protein, 8 aa, synthetic construct
  VARIANT 2: note = S or N
  VARIANT 3: note = V or T
  VARIANT 4: note = S or G
IXXXDGST

SEQ ID NO: 79 - protein, 7 aa, synthetic construct
  VARIANT 4: note = R or G
IDTXGST

SEQ ID NO: 80 - protein, 8 aa, synthetic construct
  VARIANT 3: note = W, R, or Y
  VARIANT 4: note = T or P
  VARIANT 6: note = G or L
  VARIANT 7: note = S or I
IRXXGXXT

SEQ ID NO: 81 - protein, 120 aa, synthetic construct
EVQLVESGGGLVQPGGSLRVSCAASGSIFRADAMGWHRQAPGKPREFVAGIRSDGFTNYADSVKGRFTISWDTVKNTVYLQMNSLRPEDTAVYYCYYQSLSSPNYGQVFWGQGTQVTVSS

SEQ ID NO: 82 - protein, 120 aa, synthetic construct
EVQLVESGGGLVQPGGSLRLSCAASGSIVSTNGMGWHRQAPGKGRELVAGIRSDGFTNYADSVKGRFTISSDNVKNTVYLQMNSLRAEDTGVYYCYYQALSSPNYGQTFWGQGTQVTVSS

SEQ ID NO: 83 - protein, 123 aa, synthetic construct
EVQLLESGGGLVQPGGSLRLSCAASGFTFDDIAMTWVRQAPGKGLEWVSSIYSYGPNTYYADSVKGRFTISTDSAKNTLYLQMNSLRPEDTAVYYCAADSDLSTVVVGPHDYWGQGTQVTVSS

SEQ ID NO: 84 - protein, 125 aa, synthetic construct
EVQLLESGGGLAQPGGSLRLSCAASGFTFSRYAMSWARQAPGKGLEWVSGISDDGSDTYYADSVKGRFTISRDNAKNTVYLQMNSLRPEDTAVYYCAKDAGSWGTGPFGYEYDYWGQGTQVTVSS

SEQ ID NO: 85 - protein, 118 aa, synthetic construct
EVQLLESGGGLVQPGGSLRLSCAASGRTFSDYGMGWFRQAPGKDSEFVAAINWSNGRTNYADSVKGRFTISRDNAKNTGYLQMNSLRVEDTAVYYCAATPSGKAYSYWGQGTQVTVSS

SEQ ID NO: 86 - protein, 129 aa, synthetic construct
EVQLLESGGGLVQPGGSLRLSCAASGLTLDYYAIGWFRQAPGKEREGVSCISTSDGSTYYADSVKGRFTISRDNAKNTVYLQMNSLRPEDTAVYYCATPGPYTYCAPYGSSWSRGYDYWGQGTQVTVSS

SEQ ID NO: 87 - protein, 118 aa, synthetic construct
EVQLLESGGGLVQPGGSLRLSCAASGFTFSMYSMSWVRQAPGKGPEWVSAIDTRGSTRYADSVKGRFTISRDNAKNTLYLQMNSLRPEDTAVYYCARVGGAPYEYNYRGQGTQVTVSS

SEQ ID NO: 88 - protein, 118 aa, synthetic construct
EVQLLESGGGLVQPGGSLRLSCAASGFNFSMYSMSWVRQAPGKGPEWVSAIDTGGSTRYADSVKGRFTISRDNAKNTLYLQMNSLRPEDTAVYYCARVRGTPYEYGYRGQGTQVTVSS

SEQ ID NO: 89 - protein, 118 aa, synthetic construct
EVQLLESGGGLVQPGGSLRLSCAASGRTFGSYTMGWFRQAPGKEQEFLASIRRTGGSTSYADSVKGRFTISRDNAKKTVYLQMNSLRPEDTAVYYCAAAPTGRAFTYWGQGTQVTVSS

SEQ ID NO: 90 - protein, 118 aa, synthetic construct
EVQLLESGGGLVQPGGSLRLSCAASGRTFSSLFMGWFRQAPGKEREFVASIRYPGLITNYADSAKGRFTISRDSAKNTVYLQMNSLRPEDTGVYYCAAAPTGRAFNYWGQGTQVTVSS

SEQ ID NO: 91 - protein, 113 aa, synthetic construct
EVQLVESGGGLVQPGGSLRLSCAVSGASLSRNAIIWVRQAPGKGLEWVSTIYDDGETYYADSVKGRFTISRDLAKNTVYLQMNSLRAEDTAVYYCAGSAFDFWGQGTQVTVSS

SEQ ID NO: 92 - protein, 116 aa, synthetic construct
EVQLVESGGGLVQPGGSLRLSCAASGSTFRFPPMGWYRQAPGKQREQVAQLTSGGSTNYADSVKGRFTISRDNAKNTWYLQMNSLRPEDTAVYYCSVLGRDMMTYWGQGTQVTVSS

SEQ ID NO: 93 - protein, 120 aa, synthetic construct
EVQLVESGGDLVQAGGSLRVSCAASGSIFRTDAMGWHRQVPGKQREFVAGIRSDGYTNYADSVKGRFTISRDTVKNTVYLQMNSLKPEDTAVYSCYYQSLSSPNYGQVFWGQGTQVTVSS

SEQ ID NO: 94 - protein, 120 aa, synthetic construct
EVQLVESGGDLVQAGGSLRLSCAASGSIVSTKAMGWHRQVPGKRRELVAGIRSDGFTNYADSVKGRFTISSDSVNDTVYLQMNSLKAEDTAVYFCFYQSLSTPSYGQTFWGQGTQVTVSS

SEQ ID NO: 95 - protein, 120 aa, synthetic construct
EVQLVESGGGLVQAGGSLGVSCAASGSIFRTDAMGWHRQVPGKQREFVAGIRSDGFTNYADSVKGRFTISRDTVKNTVYLQMNSLKPEDTAVYSCYYQSLSSPNYGQVFWGQGTQVTVSS

SEQ ID NO: 96 - protein, 120 aa, synthetic construct
EVQLVESGGDLVQAGGSLRLSCAASGSIVSTNGMGWHRQVPGKGRELVAGIRSDGFTNYADSVKGRFTISSDNVKNTVYLQMNSLKAEDSGVYFCYYQALSSPNYGQTFWGQGTQVTVSS

SEQ ID NO: 97 - protein, 120 aa, synthetic construct
EVQLVESGGGSVQAGGSLRLSCAASGSIVSTNGMGWHRQVPGKGRELVAGIRSDGFTNYADSVKGRFTISSDNVKNTVYLQMNSLKAEDSGVYFCYYQALSSPNYGQTFWGQGTQVTVSS

SEQ ID NO: 98 - protein, 120 aa, synthetic construct
EVQLVESGGDLVQAGGSLRLSCAASGSIVSTNGMGWHRQVPGKGRELVAGIRSDGFTNYADSVKGRFTISSDNVKNTVYLQMNSLKAEDSGVYFCYYQSLSTPNYGQTFWGQGTQVTVSS

SEQ ID NO: 99 - protein, 120 aa, synthetic construct
EVQLVESGGDLVQAGGSLRLSCAASGSIVSTNSMGWHRQVPGKQRELVAGIRSDGFINYADAVKGRFTISSDNVNNTVYLQMNSLKPEDTAVYLCFYQSLSTPNFGQVFWGQGTQVTVSS

SEQ ID NO: 100 - protein, 120 aa, synthetic construct
EVQLVESGGGSVQAGGSLRLSCAASGSIFSLNGMGWYRQAPGKQRELVAGIRSDGLVNYGDSVKGRFTISGDNAKSTVYLQMNGLKPEDTADYDCYYQSLSTPNYGQTFWGQGTQVTVSS

SEQ ID NO: 101 - protein, 120 aa, synthetic construct
EVQLVESGGDLVQAGGSLRLSCAASGNIVSSNSMGWHRQVPGKRRELVAGIRSDGFINYADSVKGRFTISSDNVNNTVYLQMNSLKPEDTAVYLCFYQSLSHPNYGHVFWGQGTQVTVSS

SEQ ID NO: 102 - protein, 120 aa, synthetic construct
EVQLVESGGDLVQAGGSLRLSCAASGSIVSTKAMGWHRQVPGKRRELVAGIRSDGFTNYADSVKGRFTISSDSVNDTVYLQMNSLKAEDTAVYFCFYQPLSTPNYGQTFWGQGTQVTVSS

SEQ ID NO: 103 - protein, 120 aa, synthetic construct
EVQLVESGGDLVQAGGSLRLSCAASGSIVSTKAMGWHRQVPGKRRELVAGIRSDGFTNYADSVKGRFTISSDSVNDTVYLQMNSLKAEDTAVYFCFYQSLSTPNYGRTFWGQGTQVTVSS

SEQ ID NO: 104 - protein, 120 aa, synthetic construct
EVQLVESGGDLVQAGGSLRLSCAASGSIVSTNSMGWHRQVPGKRRELVAGIRSDGFINYADSVKGRFTISSDNVNNTVYLQMNSLKPEDTAVYLCFYHSLSTPNYGQVFWGQGTQVTVSS

SEQ ID NO: 105 - protein, 120 aa, synthetic construct
EVQLVESGGDLVQAGGSLRLSCAASGSIVSTRAMGWHRQVPGKRRELVAGLRSDGFTNYADSVKGRFTISSDNVKNTVHLQMNSLKAEDTAVYFCFYQSLSTPNSGQTFWGQGTQVTVSS

SEQ ID NO: 106 - protein, 120 aa, synthetic construct
EVQLVESGGDLVQAGGSLRLSCAASGSIVSTRAMGWHRQVPGKRRELVAGLRSDGFTNYADSVKGRFTISSDNVKNTVHLQMNSLKAEDTAVYFCFYQSLSTPKYGQTFWGQGTQVTVSS

SEQ ID NO: 107 - protein, 120 aa, synthetic construct
EVQLVESGGGSVQAGGSLRLSCAASGSIFSLNGMGWYRQAPGKQRELVAGIRSDGLVNYGDSVKGRFTISGDNAKSTVYLQMNGLKPEDTADYDCYYQSFSSPNYGQTFWGQGTQVTVSS

SEQ ID NO: 108 - protein, 120 aa, synthetic construct
EVQLVESGGDLVQAGGSLRLSCAASGSIVSSRSMGWHRQVPGKRRELVAGIRSDGFINYADSVKGRFTISSDNVNNTVYLQMNSLKPEDTAVYLCFYHSLSTPNYGQVFWGQGTQVTVSS

SEQ ID NO: 109 - protein, 120 aa, synthetic construct
EVQLVESGGDLVQAGGSLRLSCAASGSIVSTKAMGWHRQVPGKRRELVAGIRSDGFTNYADSVKGRFTISSDSVNDTVYLQMNSLKAEDTAVYFCFYQSLGTPNYGQTFWGQGTQVTVSS

SEQ ID NO: 110 - protein, 120 aa, synthetic construct
EVQLVESGGDLVQAGGSLRLSCAASGSIVSTKAMGWHRQVPGKRRELVAGIRSDGFTNYADSVKGRFTISSDSVNDTVYLQMNSLKAEDTAVYFCFDQSLSTPNYGQTFWGQGTQVTVSS

SEQ ID NO: 111 - protein, 120 aa, synthetic construct
EVQLVESGGDLVQAGGSLRLSCAASGSIVSTKAMGWHRQVPGKRRELVAGIRSDGFTNYADSVKGRFTISSDSVNDTVYLQMNSLKAEDTAVYFCFYQSLSTPKYGQTFWGQGTQVTVSS

SEQ ID NO: 112 - protein, 120 aa, synthetic construct
EVQLVESGGDLVQAGGSLRLSCAASGSIVSTNAMGWHRQVPGKGRELVAGFRSDGFTNYADSVKGRFTISSDNVKNTVYLQMNSLKAEDTAVYFCFYQSLSTPNVGQTFWGQGTQVTVSS

SEQ ID NO: 113 - protein, 120 aa, synthetic construct
EVQLVESGGDLVQAGGSLRLSCAASGSIVSTNAMGWHRQVPGKGRELVAGFRSDGFTNYADSVKGRFTISSDNVKNTVYLQMNSLKAEDTAVYFCFYQSLSTPTFGQTFWGQGTQVTVSS

SEQ ID NO: 114 - protein, 120 aa, synthetic construct
EVQLVESGGDLVQAGGSLRLSCAASGSIVSTNSMGWHRQVPGNRREMVAGIRSDGFINYADSVKGRFTISSDNVNNTVYLQMNSLKPEDTAVYLCFYQSLSTPNFGQVFWGQGTQVTVSS

SEQ ID NO: 115 - protein, 120 aa, synthetic construct
EVQLVESGGDLVQAGGSLRLSCAASGSIVSTNSMGWHRQVPGKRRELVAGIRSDGFINYADSVKGRFTISSDNVNNTVYLQMNSLKPEDTAVYLCFYQSLSTPNYGQLFWGQGTQVTVSS

SEQ ID NO: 116 - protein, 120 aa, synthetic construct
EVQLVESGGDLVQAGGSLRLSCAASGSIVSTNSMGWHRQVPGKRRELVAGIRSDGFINYADSVKGRFTISSDNVNNTVYLQMNSLKPEDTAVYLCFYQSLSTPNYGQVFWGQGTQVTVSS

SEQ ID NO: 117 - protein, 120 aa, synthetic construct
EVQLVESGGDLVQAGGSLRLACAASGSIVSTNSMGWHRQVPGKRRELVAGIRSDGFINYADSVKGRFTIFSDNVNNTVYLQMNSLKPEDTAVYLCFYQSLSTHNYGQVFWGRGTQVTVSS

SEQ ID NO: 118 - protein, 120 aa, synthetic construct
EVQLVESGGDLVQAGGSLRLSCAASGSIVSTNSMGWHRQVPGKRRELVAGIRSDGFINYADSVKGRFTISSDNVNNTVYLQMNSLKPEDSAVYLCFYQSLSTSNYGQVFRGQGTQVTVSS

SEQ ID NO: 119 - protein, 120 aa, synthetic construct
EVQLVESGGDLVQAGGSLRLSCAASGSIVSTNSMGWHRQVPGKRRELVAGIRSDGFINYADSVKGRFTISSDNVNNTVYLQMNSLKPEDTAVYLCFYQSLSTPTYGQVFWGQGTQVTVSS

SEQ ID NO: 120 - protein, 120 aa, synthetic construct
EVQLVESGGDLVQAGGSLRLSCAASGSIVSTNSMGWHRQVPGKRRELVAGIRSDGFINYADSVKGRFTISSDNVNNTVYLQMNSLKPEDTAVYLCFYQSLSTPKYGQVFWGQGTQVTVSS

SEQ ID NO: 121 - protein, 120 aa, synthetic construct
EVQLVESGGDLVQAGGSLRLSCAASGSIVSTNSMGWHRQVPGKRRELVAGIRSDGFINYADSVKGRFTISSDNVNNTVYLQMNSLKPEDTAVYLCFYQSLSTPNYGHVFWGQGTQVTVSS

SEQ ID NO: 122 - protein, 120 aa, synthetic construct
EVQLVESGGDLVQAGGSLRLSCAASGSIVSTNSMGWHRQVPGKRRELVAGIRSDGFINYADSVKGRFTISSDNVNNTVYLQMNSLKPEDTAVYLCFYQSLGTPNYGQVFWGQGTQVTVSS

SEQ ID NO: 123 - protein, 120 aa, synthetic construct
EVQLVESGGDLVQAGGSLRLSCAASGSIVSTNSMGWHRQVPGKRRELVAGIRSDGFINYADSVKGRFTISSDNVNNTVYLQMNSLKPEDTAVYLCFSQSLSTPNYGQVFWGQGTQVTVSS

SEQ ID NO: 124 - protein, 120 aa, synthetic construct
EVQLVESGGDLVQAGGSLRLSCAASGSIVSTNSMGWHRQVPGKRRELVAGIRSDGFINYADSVKGRFTISSDNVNNTVYLQMNSLKPEDTAVYLCFDQSLSTPNYGQVFWGQGTQVTVSS

SEQ ID NO: 125 - protein, 120 aa, synthetic construct
EVQLVESGGDLVQAGGSLRLSCAASGSIVSTNSMGWHRQVPGKRRELVAGIRSDGFINYADSVKGRFTISSDNVNNTVYLQMNSLKPEDTAVYLCFYQSHSTPNYGQVFWGQGTQVTVSS

SEQ ID NO: 126 - protein, 120 aa, synthetic construct
EVQLVESGGDLVQAGGSLRLSCAASGSIVSTNSMGWHRQVPGKRRELVAGIRSDGFINYADSVKGRFTISSDNFNNTVYLQMNSLKPEDTAVYLCFYQSLSTPNYGRVFWGQGTQVTVSS

SEQ ID NO: 127 - protein, 120 aa, synthetic construct
EVQLVESGGDLVQAGGSLRLSCAASGSIVSTRAMGWHRQVPGKRRELVAGLRSDGFTNYADSVKGRFTISSDNVKNTVHLQMNSLKAEDTAVYFCFYQSHSTPNYGQTFWGQGTQVTVSS

SEQ ID NO: 128 - protein, 120 aa, synthetic construct
EVQLVESGGDLVQAGGSLRLSCAASGSIVSTRAMGWHRQVPGKRRELVAGLRSDGFTNYADSVKGRFTISSDNVKNTVHLQMNSLKAEDTAVYFCFDQSLSTPNYGQTFWGQGTQVTVSS

SEQ ID NO: 129 - protein, 120 aa, synthetic construct
EVQLVESGGDSVQAGGSLRLSCAASGNIVSSNSMGWHRQVPGKRRELVAGIRSDGFINYADSVKGRFTISSDNVNNTVYLQMNSLKPEDTAVYLCFYQSLSHPNYGHVFWGQGTQVTVSS

SEQ ID NO: 130 - protein, 120 aa, synthetic construct
EVQLVESGGDLVQAGGSLRLSCAASGSIVSSRSMGWHRQVPGKRRELVAGIRSDGFINYADSVKGRFTISSDNVNNTVYLQMNSLKPEDTAVYLCFHQSLSTPNYGQVFWGQGTQVTVSS

SEQ ID NO: 131 - protein, 120 aa, synthetic construct
EVQLVESGGGLVQAGGSLRVSCAASGSIFRADAMGWHRQVPGKPREFVAGIRSDGFTNYAEAVKGRFTISWDTVKNTVYLQMNSLKPEDTAVYTCYYQSLSSPNYGQTIWGQGTQVTVSS

SEQ ID NO: 132 - protein, 120 aa, synthetic construct
EVQLVESGGDLVQAGGSLRLSCAASGSIVSTKAMGWHRQVPGKRRELVAGIRSDGFTNYADSVKGRFTISSDSVNDTVYLQMNSLKAEDTAVYFCFYQSLSTPNYGQTFWGQGTQVTVSS

SEQ ID NO: 133 - protein, 120 aa, synthetic construct
EVQLVESGGDLVQAGGSLRLSCAASGSIVSTKAMGWHRQVPGKRRELVAGIRSDGFTNYADSVKGRFIISSDSVNDTVYLQMNSLKAEDTAVYFCFYQSLGTPNYGQTFWGQGTQVTVSS

SEQ ID NO: 134 - protein, 120 aa, synthetic construct
EVQLVESGGDLVQAGGSLRLSCAASGSIVSTKAMGWHRQVPGKRRELVAGIRSDGFTNYADSVKGRFTISSDSVNDTVYLQMNSLKAEDTAVYFCFYHSLSTPNYGQTFWGQGTQVTVSS

SEQ ID NO: 135 - protein, 120 aa, synthetic construct
EVQLVESGGDLVQAGGSLRLSCAASGSIVSTKAMGWHRQVPGKRRELVAGIRSDGFTNYADSVKGRFTISSDSVNDTVYLQMNSLKAEDTAVYFCFYQSLSTPNSGQTFWGQGTQVTVSS

SEQ ID NO: 136 - protein, 120 aa, synthetic construct
EVQLVESGGDLVQAGGSLRLSCAASGSIVSTNSMGWHRQVPGKRRELVAGIRSDGFINYADSVKGRFTISSDNVNNTVYLQMNSLKPEDTAVYLCFYQSLSSPNYGQTFWGQGTQVTVSS

SEQ ID NO: 137 - protein, 120 aa, synthetic construct
EVQLVESGGDLVQAGGSLRLSCAASGSIVSTNSMGWHRQVPGKRRELVAGIRSDGFINYADSVKGRFTISSDNVNNTVYLQMNSLKPEDTAVYLCFYQSLSSANYGQVFWGQGTQVTVSS

SEQ ID NO: 138 - protein, 120 aa, synthetic construct
EVQLVESGGDLVRAGGSLRLSCAASGSIVSTNSMGWHRQVPGKRRELVAGIRSDGFINYADSVKGRFTISSDNVNNTVYLQMNSLKPEDTAVYLCFYQSLSTPTYGQVFWGQGTQVTVSS

SEQ ID NO: 139 - protein, 120 aa, synthetic construct
EVQLVESGGDLVQAGGSLRLSCAASGSIVSTNSMGWHRQVPGKRRELVAGIRSDGFINYADSVKGRFTISSDNVNNTVYLQMNSLKPEDTAVYLCFYQSLSTPNYGQVSWGQGTQVTVSS

SEQ ID NO: 140 - protein, 120 aa, synthetic construct
EVQLVESGGDLVQAGGSLRLSCAASGSIVSTNSMGWHRQVPGKRRELVAGIRSDGFINYADSVKGRFTISSDNVNNTVYLQMNSLKPEDTAVYLCFYQSISTPNYGQVFWGQGTQVTVSS

SEQ ID NO: 141 - protein, 120 aa, synthetic construct
EVQLVESGGGLVQAGGSLRLSCAASGSIFSTNAMGWYRQAPGKPRELVAGIHSNGITTYADSVKGRFTISRDNVKNTVYLQMNSLKPEDTAVYDCYYQSLSSTNYGQAFWGQGTQVTVSS

SEQ ID NO: 142 - protein, 120 aa, synthetic construct
EVQLVESGGDLVQAGGSLRLSCAASGSIVSTKAMGWHRQVPGKRRELVAGIRSDGFTNYADSVKGRFTISSDSVNDTVYLQMNSLKAEDTAVYFCFSQSLSTPNYGQTFWGQGTQVTVSS

SEQ ID NO: 143 - protein, 120 aa, synthetic construct
EVQLVESGGDLVQAGGSLRLSCAASGSIVSTNAMGWHRQVPGKGRELVAGFRSDGFTNYADSVKGRFTISSDNVKNTVYLQMNSLKAEDTAVYFCFYQSLSTPKFGQTFWGQGTQVTVSS

SEQ ID NO: 144 - protein, 120 aa, synthetic construct
EVQLVESGGDLVQAGGSLRLSCAASGSIVSTNGMGWHRQVPGKGRELVAGIRSDGFTNYADSVKGRFTISSDNVKNTVYLQMNSLKAEDTAVYFCFYQSLSSPNYGQTFWGQGTQVTVSS

SEQ ID NO: 145 - protein, 120 aa, synthetic construct
EVQLVESGGDLVQAGGSLRLSCAASGSIVSTNGMGWHRQVPGKGRELVAGIRSDGFTNYADSVKGRFTISSDNVKNTVYLQMNSLKAEDSGVYFCSYQALSSPNSGQTFWGQGTQVTVSS

SEQ ID NO: 146 - protein, 120 aa, synthetic construct
EVQLVESGGDLVQAGGSLRLSCAASGSIVSTNGMGWHRQVPGKGRELVAGIRSDGFTNYADSVKGRFTISSDNVKNTVYLQMNSLKAEDTAVYFCFYQSLSSANYGQVFWGQGTQVTVSS

SEQ ID NO: 147 - protein, 120 aa, synthetic construct
EVQLVESGGDLVQAGGSLRLACAASGSIVSTNSMGWHRQVPGKRRELVAGIRSDGFINYADSVKGRFTIFSDNVNNTVYLQMNSLKPEDTAVYLCFYQSLSTHNYGQVFWGRGTRVTVSS

SEQ ID NO: 148 - protein, 120 aa, synthetic construct
EVQLVESGGDLVQAGGSLRLSCAASGSIVSTNSMGWHRQVPGKRRELVAGIRSDGFINYADSVKGRFTISSDNVNNTVYLQMNSLKPEDTAVYLCFYQSLSTPNYGKVFWGQGTQVTVSS

SEQ ID NO: 149 - protein, 120 aa, synthetic construct
EVQLVESGGDLVQAGGSLRLSCAASGSIVSTNSMGWHRQVPGKRRELVAGIRSDGFINYADSVKGRFTISSDNVNNTVYLQMNSLKPEDTAVYLCFYQSLSTPNYGQVYWGQGTQVTVSS

SEQ ID NO: 150 - protein, 120 aa, synthetic construct
EVQLVESGGDLVQAGGSLRLSCAASGSIVSTNSMGWHRQVPGKRRELVAGIRSDGFINYADSVKGRFTISSDNVNNTVYLQMNSLKPEDTAVYLCFYQSLRTPNYGQVFWGQGTQVTVSS

SEQ ID NO: 151 - protein, 120 aa, synthetic construct
EVQLVESGGDLVQAGGSLRLSCAASGSIVSTRAMGWHRQVPGKRRELVAGLRSDGFTNYADSVKGRFTISSDNVKNTVHLQMNSLKAEDTAVYFCFYQSLSSPNYGQTFWGQGTQVTVSS

SEQ ID NO: 152 - protein, 120 aa, synthetic construct
EVQLVESGGDLVQAGGSLRVSCAASGSIFRTDAMGWHRQVPGKQREFVAGIRSDGYTNYADSVKGRFTISRDTVKNTVYLQMNSLKPEDTAVYSCYYQSLSSPNYGQTIWGQGTQVTVSS

SEQ ID NO: 153 - protein, 120 aa, synthetic construct
EVQLVESGGDLVQAGGSLRLSCAASGSIVSSRSMGWHRQVPGKRRELVAGIRSDGFINYADSVKGRFTISSDNVNNTVYLQMNSLKPEDTADYLCFYQSLSTPNYGQVSWGQGTQVTVSS

SEQ ID NO: 154 - protein, 120 aa, synthetic construct
EVQLVESGGDLVQAGGSLRLSCAASGSIVSSRSMGWHRQVPGKRRELVAGIRSDGFINYADSVKGRFTISSDNVNNTVYLQMNSLKPEDTAVYLCFYQSLSTPNYGKVFWGQGTQVTVSS

SEQ ID NO: 155 - protein, 120 aa, synthetic construct
EVQLVESGGDLVQAGGSLRLSCAASGSIVSTNNMGWHRQVPGKGRELVAGIRSDGFINYADSVKGRFTISSDNVKNTVYLQMNSLKPEDTAVYLCFYQSLSTPNYGHVFWGQGTQVTVSS

SEQ ID NO: 156 - protein, 120 aa, synthetic construct
EVQLVESGGGLVQAGGSLRLSCAASGNIVSSNSMGWHRQVPGKRRELVAGIRSDGFINYADSVKGRFTISSDNVNNTVYLQMNSLKPEDTAVYLCFYQSLSHPNYGHVFWGQGTQVTVSS

SEQ ID NO: 157 - protein, 120 aa, synthetic construct
EVQLVESGGDLVQAGGSLRLSCAASGSIVSTKAMGWHRQVPGKRRELVAGIRSDGFTNYADSVKGRFTISSDSVNDTVYLQMNSLKAEDTAVYFCFYQSLSSPNYGQTFWGQGTQVTVSS

SEQ ID NO: 158 - protein, 120 aa, synthetic construct
EVQLVESGGGLVQAGGSLRLSCAASGSIVSTKAMGWHRQVPGKRRELVAGIRSDGFTNYADSVKGRFTISSDSVNDTVYLQMNSLKAEDTAVYFCFYQPLSTPNYGQTFWGQGTQVTVSS

SEQ ID NO: 159 - protein, 120 aa, synthetic construct
EVQLVESGGDLVQAGGSLRLSCAASGSIVSTKAMGWHRQVPGKRRELVAGIRSDGFTNYADSVKGRFTISSDSVNDTVYLQMNSLKAEDTAVYFCFYQSLRTPNYGQTFWGQGTQVTVSS

SEQ ID NO: 160 - protein, 120 aa, synthetic construct
EVQLVESGGDLVQAGGSLRLSCAASGSIVSTKAMGWHRQVPGKRRELVAGIRSDGFTNYADSVKGRFTISSDSVNDTVYLQMNSLKAEDTAVYFCFYQSLSTPNYGHTFWGQGTQVTVSS

SEQ ID NO: 161 - protein, 120 aa, synthetic construct
EVQLVESGGDLVQAGGSLRLSCAASGSIVSTKAMGWHRQVPGKRRELVAGIRSDGFTNYADSVKGRFTISSDSVNGTVYLQMSSLKAEDTAVYFCFYQSLSTPNHGQTFWGQGTQVTVSS

SEQ ID NO: 162 - protein, 120 aa, synthetic construct
EVQLVESGGDLVQAGGSLRLSCAASGSIVSTKAMGWHRQVPGKRRELVAGIRSDGFTNYADSVKGRFTISSDSVNDTVYLQMNSLKAEDTAVYFCFYQSLSTPNYGQTYWGQGTQVTVSS

SEQ ID NO: 163 - protein, 120 aa, synthetic construct
EVQLVESGGDLVQAGGSLRLSCAASGSIVSTKAMGWHRQVPGKRRELVAGIRSDGFTNYADSVKGRFTISSDSVNDTVYLQMNSLKAEDTAVYFCFYQSLSTPTYGQTFWGQGTQVTVSS

SEQ ID NO: 164 - protein, 120 aa, synthetic construct
EVQLVESGGDLVQAGGSLRLSCAASGSIVSTNAMGWHRQVPGKGRELVAGFRSDGFTNYADSVKGRFTISSDNVKNTVYLQMNSLKAEDTAVYFCFYQSLSSPNYGQTFWGQGTQVTVSS

SEQ ID NO: 165 - protein, 120 aa, synthetic construct
EVQLVESGGDLVQAGGSLRLSCAASGSIVSTNAMGWHRQVPGKGRELVAGFRSDGFTNYADSVKGRFTISSDNVKNTVYLQMNSLKAEDTAVYFCFYQSLSTPNSGQTFWGQGTQVTVSS

SEQ ID NO: 166 - protein, 120 aa, synthetic construct
EVQLVESGGDLVQAGGSLRLSCAASGSIVSTNAMGWHRQVPGKGRELVAGFRSDGFTNYADSVKGRFTISSDNVKNTVYLQMNSLKAEDTAVYFCFYQSLSTPIFGQTFWGQGTQVTVSS

SEQ ID NO: 167 - protein, 120 aa, synthetic construct
EVQLVESGGDLVQAGGSLRLSCAASGSIVSTNGMGWHRQVPGKGRELVAGIRSDGFTNYADSVKGRFTISSDSVNDTVYLQMNSLKAEDTAVYFCFYQPLSTPNYGQTFWGQGTQVTVSS

SEQ ID NO: 168 - protein, 120 aa, synthetic construct
EVQLVESGGDLVQAGGSLRLSCAASGSIVSTNGMGWHRQVPGKGRELVAGIRSDGFTNYADSVKGRFTISSDNVKNTVYLQMNSLKAEDSGVYFCDYQALSSPKYGQTFWGQGTQVTVSS

SEQ ID NO: 169 - protein, 120 aa, synthetic construct
EVQLVESGGDLVQAGGSLRLSCAASGSIVSTNGMGWHRQVPGKGRELVAGIRSDGFTNYADSVKGRFTISSDNVKNTVYLQMTSLKAEDSGVYFCYYQALSSPNYGQTFWGQGTQVTVSS

SEQ ID NO: 170 - protein, 120 aa, synthetic construct
EVQLVESGGDLVQAGGSLRLSCAASGSIVSTNSTGWHRQVPGKQRELVAGIRSDGFINYADAVKGRFTISSDNVNNTVYLQMNSLKPEDTAVYLCFYQSLSTPNFGQVFWGQGTQVTVSS

SEQ ID NO: 171 - protein, 120 aa, synthetic construct
EVQLVESGGGLVQAGGSLRLSCAASGSIVSTNSMGWHRQVPGKQRELVAGIRSDGFINYADAVKGRFTISSDNVNNTVYLQMNSLKPEDTAVYLCFYQSLSTPNFGQVFWGQGTQVTVSS

SEQ ID NO: 172 - protein, 120 aa, synthetic construct
EVQLVESGGDLVQAGGSLRLSCAASGSIVSTNSMGWHRQVPGKRRELVAGIRSDGFINYADSVKGRFTISSDNVNNTVYLQMNSLKPEDTAVYLCFYQSLSTPNYGLVFWGQGTQVTVSS

SEQ ID NO: 173 - protein, 120 aa, synthetic construct
EVQLVESGGDLVQAGGSLRLSCAASGSIVSTNSMGWHRQVPGKRRELVAGIRSDGFINYADSVKGRFTISSDNVNNTVYLQMNSLKPEDTAVYLCFYQSLSTPNYGRVFWGQGTQVTVSS

SEQ ID NO: 174 - protein, 120 aa, synthetic construct
EVQLVESGGDLVQAGGSLRLSCAASGSIVSTNSMGWHRQVPGKRRELVAGIRSDGFINYADSVKGRFTISSDNVNNTVYLQMNSLKPEDTAVYLCFYQSLSAPNYGQVFWGQGTQVTVSS

SEQ ID NO: 175 - protein, 120 aa, synthetic construct
EVQLVESGGDLVQAGGSLRLSCAASGSIVSTNSMGWHRQVPGKRRELVAGIRSDGFINYADSVKGRFTISSDNVNNTVYLQMNSLKPEDTAVYLCFYQSLSTPNYVQVFWGQGTQVTVSS

SEQ ID NO: 176 - protein, 120 aa, synthetic construct
EVQLVESGGDLVQAGGSLRLSCAASGSIVSTNSMGWHRQVPGKRRELVAGIRSDGFINYADSVKGRFTISSDNVNNTVYLQMNSLKPEDTAVYLCFYQSLITPNYGQVFWGQGTQVTVSS

SEQ ID NO: 177 - protein, 120 aa, synthetic construct
EVQLVESGGDLVQAGGSLRLSCAASGSIVSTNSMGWHRQVPGKRRELVAGIRSDGFINYADSVKGRFTISSDNVNNTVYLQMNSLKPEDTAVYLCFYQSLSTPNYGQLFLGQGTQVTVSS

SEQ ID NO: 178 - protein, 120 aa, synthetic construct
EVQLVESGGDLVQAGGSLRLACAASGSIVSTNSMGWHRQVPGKRRELVAGIRSDGFINYADSVKGRFTIFSDNVNNTVYLQMNSLKPEDTAVYLCFYQSLSTHNYGQVFWGQGTQVTVSS

SEQ ID NO: 179 - protein, 120 aa, synthetic construct
EVQLVESGGDLVQAGGSLRLSCAASGSIVSTNSMGWHRQVPGRRRELVAGIRSDGFINYADSVKGRFTISSDNVNNTVYLQMNSLKPEDTAVYLCFYQSLSTPNYGRVFWGQGTQVTVSS

SEQ ID NO: 180 - protein, 120 aa, synthetic construct
EVQLVESGGDLVQAGGSLRLSCAASGSIVSTRAMGWHRQVPGKRRELVAGLRSDGFTNYADSVKGRFTISSDNVKNTVHLQMNSLKAEDTAVYFCFYHSLSTPNYGQTFWGQGTQVTVSS

SEQ ID NO: 181 - protein, 120 aa, synthetic construct
EVQLVESGGDLVQAGGSLRLSCAASGSIVSTRAMGWHRQVPGKRRELVAGLRSDGFTNYADSVKGRFTISSDNVKNTVHLQMNSLKAEDTAVYFCFYQSLSTPNYGHTFWGQGTQVTVSS

SEQ ID NO: 182 - protein, 120 aa, synthetic construct
EVQLVESGGDLVQAGGSLRLSCAASGSIVSTRAMGWHRQVPGKRRELVAGLRSDGFTNYADSVKGRFTISSDNVKNTVHLQMNSLKAEDTAVYFCFYQSLRTPNYGQTFWGQGTQVTVSS

SEQ ID NO: 183 - protein, 120 aa, synthetic construct
EVQLVESGGDLVQAGGSLRLSCAASGSIVSTRAMGWHRQVPGKRRELVAGLRSDGFTNYADSVKGRFTISSDNVKNTVHLQMNSLKAEDTAVYFCFSQSLSTPNYGQTFWGQGTQVTVSS

SEQ ID NO: 184 - protein, 120 aa, synthetic construct
EVQLVESGGDLVQAGGSLRLSCAASGSIVSTRAMGWHRQVPGKRRELVAGLRSDGFTNYADSVKGRFTISSDNVKNTVHLQMNSLKAEDTAVYFCFYQSLSTPNDGQTFWGQGTQVTVSS

SEQ ID NO: 185 - protein, 120 aa, synthetic construct
EVQLVESGGDLVQAGGSLRLACAASGSIVSTNSMGWHRQVPGKRRELVAGIRRDGFINYADSVKGRFTIFSDNVNNTVYLQMNSLKPEDTAVYLCFYQSLSTHNYGQVFWGRGTQVTVSS

SEQ ID NO: 186 - protein, 120 aa, synthetic construct
EVQLVESGGDLVQAGGSLRLSCAASGSIVSSRSMGWHRQVPGKRRELVAGIRSDGSINYADSVKGRFTISSDNVNNTVYLQMNSLKPEDTAVYLCFYQSLGTPNYGQVFWGQGTQVTVSS

SEQ ID NO: 187 - protein, 120 aa, synthetic construct
EVQLVESGGGSVQAGGSLRLSCAASGSIFSLNGMGWYRQAPGKQRELVAGIRSDGLVNYGDSVKGRFTISGDNAKSTVYLQMNGLKPEDTADYDCYYQSFSSANYGQVFWGQGTQVTVSS

SEQ ID NO: 188 - protein, 120 aa, synthetic construct
EVQLVESGGGSVQAGGSLRLSCAASGSIFSLNGMGWYRQAPGKQRELVAGIRSNDMANYGDSVKGRFTISGDNAKSTVYLQMNSLKPEDTADYYCYYQSLSSANYGQVFWGQGTQVTVSS

SEQ ID NO: 189 - protein, 120 aa, synthetic construct
EVQLVESGGGSVQAGGSLRLSCAASGSIFSLNGMGWYRQAPGKQRELVAGIRSDGMVNYGDSVKGRFTISGDNAKSTVYLQMNSLKPEDTADYYCYYQSLGSANYGQVFWGQGTQVTVSS

SEQ ID NO: 190 - protein, 120 aa, synthetic construct
EVQLVESGGGSVQAGGSLRLSCAASGSIFSFNGMGWYRQAPGKQRELVAGIRSDGMANYGDSVKGRFTISGDNAKSTVYLQMNSLKPEDTADYYCYYQSYSSANYGHVFWGQGTQVTVSS

SEQ ID NO: 191 - protein, 120 aa, synthetic construct
EVQLVESGGGLVQAGGSLRLSCAASTSIFSANGMGWYRQAPGKQRELVAGVRTDGFLNYGDSVKGRFTISRDNAKNTVYLQMNMLKPEDTADYYCYYQSLGSANYGQVFWGQGTQVTVSS

SEQ ID NO: 192 - protein, 120 aa, synthetic construct
EVQLVESGGGSVQAGGSLRLSCAASGSIFSLNGMGWYRQAPGKQRELVAGIRSDGMVNYGDSVKGRFTISGDNAKSTVYLQMNSLKPEDTADYYCYYQSLSSANYGRVFWGQGTQVTVSS

SEQ ID NO: 193 - protein, 120 aa, synthetic construct
EVQLVESGGGLVQAGGSLRLSCAASGSIFSLNGMGWYRQAPGKQRELVAGIRSDGLVNYGDSVKGRFTISGDNAKSTVYLQMNGLKPEDTADYDCYYQSFSSANYGQVFWGQGTQVTVSS

SEQ ID NO: 194 - protein, 120 aa, synthetic construct
EVQLVESGGGSVQAGGSLRLSCAASGSTFSFNGMGWYRQAPGKQRELVAGIRSDGMANYGDSVKGRFTISGDNAKSTVYLQMNSLKPEDTADYYCYYQSYSSANYGHVFWGQGTQVTVSS

SEQ ID NO: 195 - protein, 120 aa, synthetic construct
EVQLVESGGGSVQAGGSLRLSCAASGSIFSLNGMGWYRQAPGKQRELVAGIRSNDMANYGDSVKGRFTISGDNAKSTVYLQMNSLKPEDTADYYCYYHSLSSANYGQVFWGQGTQVTVSS

SEQ ID NO: 196 - protein, 120 aa, synthetic construct
EVQLVESGGGLVQAGGSLRLSCAASGSIFSGNGMGWYRQAPGKQRELVAGIHSNGITNYADSVKGRFTISRDNVKNTVYLQMNSLKPEDTAVYYCYYQSYSSANYGQAFWGQGTQVTVSS

SEQ ID NO: 197 - protein, 120 aa, synthetic construct
EVQLVESGGGLVQAGGSLRLSCAASGSVFSGNGMGWYRQAPGKQRELVAGIHSNGITNYADSVKGRFTISRDNVKNTVYLQMNSLKPEDTAVYYCYYQSYSSANYGQAFWGQGTQVTVSS

SEQ ID NO: 198 - protein, 120 aa, synthetic construct
EVQLVESGGGSVQAGGSLRLSCAASGSVFSLNGMGWYRQAPGKQRELVAGIRSDGMVNYGDSVKGRFTISGDNAKSTVYLQMNSLKPEDTADYYCYYQSLSSANYGQVSWGQGTQVTVSS

SEQ ID NO: 199 - protein, 120 aa, synthetic construct
EVQLVESGGGSVQAGGSLRLSCAASGSIFSLNGMGWYRQAPGKQRELVAGIRSDGMVNYGDSVKGRFTISGDNAKSTVYLQMNSLKPEDTADYYCYYQSLSSANYGQVFWGQGTQVTVSS

SEQ ID NO: 200 - protein, 120 aa, synthetic construct
EVQLVESGGGSVQAGGSLRLSCAASGSIFSLNGMGWYRQAPGKQRELVAGIRSDGMVNYGDSVKGRFTISGDNAKSTVYLQMNSLKPEDTADYYCYYHSLSSANYGQVFWGQGTQVTVSS

SEQ ID NO: 201 - protein, 120 aa, synthetic construct
EVQLVESGGGSVQAGGSLRLSCAASGSIFSLNGMGWYRQAPGKQRELVAGIRSDGMVNYGDSVKGRFTISGDNAKSTVYLQMNSLKPEDTADYYCYYQSLSSASYGQVFWGQGTQVTVSS

SEQ ID NO: 202 - protein, 120 aa, synthetic construct
EVQLVESGGGSVQAGGSLRLSCAASGSIFSLNGMGWYRQAPGKQRELVAGIRSDGLVNYGDSVKGRFTISGDNAKSTVYLQMNGLKPEDTADYDCYYQSYSSANYGQVLWGQGTQVTVSS

SEQ ID NO: 203 - protein, 120 aa, synthetic construct
EVQLVESGGGSVQAGGSLRLSCAASGSIFSFNGMGWYRQAPGKQRELVAGIRSDGMANYGDPVKGRFTISGDNAKSTVYLQMSSLKPEDTADYYCYYQSYSSASYGHVFWGQGTQVTVSS

SEQ ID NO: 204 - protein, 120 aa, synthetic construct
EVQLVESGGGLVQAGGSLRLSCAASGSIFSFNGMGWYRQAPGKQRELVAGIRSDGMANYGDSVKGRFTISGDNAKSTVYLQMNSLKPEDTADYYCYYQSYSSANYGHVFWGQGTQVTVSS

SEQ ID NO: 205 - protein, 120 aa, synthetic construct
EVQLVESGGGLVQAGGSLRLSCAASGSILSGNGMGWYRQAPGKQRELVAGIHSNGITNYADSVKGRFTISRDNVKNTVYLQMNSLKPEDTAVYYCYYQSYSSANYGQAFWGQGTQVTVSS

SEQ ID NO: 206 - protein, 120 aa, synthetic construct
EVQLVESGGGSVQAGGSLRLSCAASGSIFSLNGMGWYRQAPGKQRELVAGIRSDGMVNYGDSVKGRFTISGDNAKSTVYLQMNSLKPEDTADYYCYDQSLSSANYGQVFWGQGTQVTVSS

SEQ ID NO: 207 - protein, 120 aa, synthetic construct
EVQLVESGGGSVQAGGSLRLSCAASGSIFSLNGMGWYRQAPGKQRELVAGIRSDGMVNYGDSVKGRFTISGDNAKSTVYLQMNSLKPEDTADYYCYYQSLSSAKYGQVFWGQGTQVTVSS

SEQ ID NO: 208 - protein, 120 aa, synthetic construct
EVQLVESGGGSVQAGGSLRLSCAASGSIFSLNGMGWYRQAPGKQRELVAGIRSDGMVNYGDSVKGRFTISGDNAKSTVYLQMNSLKPEDTADYYCYYQSLSSATYGQVFWGQGTQVTVSS

SEQ ID NO: 209 - protein, 120 aa, synthetic construct
EVQLVESGGGSVQAGGSLRLSCAASGSIFSLNGMGWYRQAPGKQRELVAGIRSDGMVNYGDSVKGRFTISGDNAKSTVYLQMNSLKPEDTADYYCYYQSLRSANYGQVFWGQGTQVTVSS

SEQ ID NO: 210 - protein, 120 aa, synthetic construct
EVQLVESGGGSVQAGGSLRLSCAASGSIFSLNGMGWYRQAPGKQRELVAGIRSDGLVNYGDSVKGRFTISGDNAKSTVYLQMNSLKPEDTADYYCYYQSLSSANYGRVFWGQGTQVTVSS

SEQ ID NO: 211 - protein, 120 aa, synthetic construct
EVQLVESGGGSVQAGGSLRLSCAASGSIFSLNGMGWYRQAPGKQRELVAGIRSDGMVNYGDSVKGRFTISGDNAKSTVYLQMNSLKPEDTADYYCYYQSLSSANYGKVFWGQGTQVTVSS

SEQ ID NO: 212 - protein, 120 aa, synthetic construct
EVQLVESGGGSVQAGGSLRLSCAASGSIFSFNGMGWYRQAPGKQRELVAGIRSDGMANYGDSVRGRFTISGDNAKSTVYLQMNSLKPEDTADYYCYYQSYSSANYGHVFWGQGTQVTVSS

SEQ ID NO: 213 - protein, 120 aa, synthetic construct
EVQLVESGGGSVQAGGSLRLSCAASGSIFSLNAMGWYRQAPGKQRELVAGIRSNGMANYGDSVKGRFTISGDNAKSTVYLQMNSLKPEDTADYYCYYQSFSSDNYGHVFWGQGTQVTVSS

SEQ ID NO: 214 - protein, 120 aa, synthetic construct
EVQLVESGGGLVQAGGSLRLSCVASGVTFNINAMGWYRQSQGKERELVAGIRSDGMANYGDSVKGRYTISGDNAKSTVYLQMNSLKPEDTADYYCYYQSYSSANYGHVFWGQGTQVTVSS

SEQ ID NO: 215 - protein, 120 aa, synthetic construct
EVQLVESGGGSVQAGGSLRLSCAASGSIFSLNGMGWYRQAPGKQRELVAGIRSNDMANYGDSVKGRFTISGDNAKSTVYLQMNSLKPEDTADYYCYDQSLSSANYGQVFWGQGTQVTVSS

SEQ ID NO: 216 - protein, 120 aa, synthetic construct
EVQLVESGGGSVQAGGSLRLSCAASGSIFSLNGMGWYRQAPGKQRELVAGIRSNDMANYGDSVKGRFTISGDNAKSTVYLQMNSLKPEDTADYYCYYQSLRSANYGQVFWGQGTQVTVSS

SEQ ID NO: 217 - protein, 120 aa, synthetic construct
EVQLVESGGGSVQAGGSLRLSCAASGSIFSLNGMGWYRQAPGKQRELVAGIRSDGMANYGDSVKGRFTISGDNAKSTVYLQMNSLKPEDTADYYCYHQSLSSANYGQVFWGQGTQVTVSS

SEQ ID NO: 218 - protein, 120 aa, synthetic construct
EVQLVESGGDLVQAGGSLRLSCAASGSIVSTNGMGWHRQVPGKGRELVAGIRSDGFTNYADSVKGRFTISSDNVKNTVYLQMNSLKAEDTAVYFCYYQSLTTPNFGQVFWGQGTQVTVSS

SEQ ID NO: 219 - protein, 120 aa, synthetic construct
EVQLVESGGGLVQPGGSLRLSCTASGFRFGDYAMGWHRQVPGKRRELVAGIRSDGFTNYADSVKGRFTISSEDVKNTVYLQMNSLKAEDTAVYFCYYQSLTTPNYGQLFWGQGTQVTVSS

SEQ ID NO: 220 - protein, 120 aa, synthetic construct
EVQLVESGGDLVQAGGSLRLSCAASGSIVSTNGMGWHRQVPGKGRELVAGIRSDGFTNYADSVKGRFTISSDNVKDTVYLQMNSLKAEDTAVYFCYYQSLTTPNFGQVFWGQGTQVTVSS

SEQ ID NO: 221 - protein, 120 aa, synthetic construct
EVQLVESGGDLVQAGGSLRLSCAASGSIVSTSAMGWHRQVPGKRRELVAGIRSDGFTNLADSVKGRFTISHDNVKNTAYLQMNSLKAEDTAVYFCFYQSLSTPNFGQTFWGQGTQVTVSS

SEQ ID NO: 222 - protein, 120 aa, synthetic construct
EVQLVESGGDLVQAGGSLRLSCAASGSIVSTNAMGWHRQVPGKGRELVAGFRSDGFTNYADSVKGRFTISSDNVKNTVYLQMNSLKAEDTAVYFCFYQSLSTPNFGQTFWGQGTQVTVSS

SEQ ID NO: 223 - protein, 120 aa, synthetic construct
EVQLVESGGDLVQAGGSLRLSCAASGSIVSTNGMGWHRQVPGKGRELVAGIRSDGFTNYADSVKGRFTISSDNVKNTVYLQMNSLKAEDTAVYFCFYQSLSTPNFGQTIWGQGTQVTVSS

SEQ ID NO: 224 - protein, 120 aa, synthetic construct
EVQLVESGGDLVQAGGSLRLSCAASGSIVSTSAMGWHRQVPGKRRELVAGIRSDGFTNLADSVKGRFTISHDNVKNTAYLQMNSLKAEDTAVYFCFYQSLSTPNFGKTFWGQGTQVTVSS

SEQ ID NO: 225 - protein, 120 aa, synthetic construct
EVQLVESGGDLVQAGGSLRLSCAASGSIVSTNAMGWHRQVPGKGRELVAGFRSDGFTNYADSVKGRFTISSDNAKNTVYLQMNSLKAEDTAVYFCFYQSLSTPNFGLTFWGQGTQVTVSS

SEQ ID NO: 226 - protein, 120 aa, synthetic construct
EVQLVESGGDLVQAGGSLSLSCAASGSIVSTNAMGWHRQVPGKLRELVAGIRSDGFTNYADSVKGRFTISSDDVKNTVYLQMNRLKAEDTAVYFCFYQSLTTPNFGQVFWGQGTQVTVSS

SEQ ID NO: 227 - protein, 120 aa, synthetic construct
EVQLVESGGDLVQAGGSLRLSCAASGSIVSTNAMGWHRQVPGKRRELVAGIRSDGFTNYADSVKGRFTISSDNVKNTVYLQMNSLKPEDTAVYFCFYQSLTAPNFGQVFMGQGTQVTVSS

SEQ ID NO: 228 - protein, 120 aa, synthetic construct
EVQLVESGGDLVQAGGSLRLSCAASGSIVSTNAMGWHRQVPGKGRELVAGFRSDGFTNYADSVKGRFTISSDNVKNTVYLQMNSLKAEDTAVYFCFYQSLSTPNFGHTFWGQGTQVTVSS

SEQ ID NO: 229 - protein, 120 aa, synthetic construct
EVQLVESGGGLVQAGGSLRLSCAASGSIVSTNGMGWHRQVPGKGRELVAGIRSDGFTNYADSVKGRFTISSDNVKNTVYLQMNSLKAEDTAVYFCYYQSLTTPNFGQVFWGQGTQVTVSS

SEQ ID NO: 230 - protein, 120 aa, synthetic construct
EVQLVESGGDLVQAGGSQRLSCAASGSIVSTNAMGWHRQVPGKRRELVAGIRSDGFTNYADSVKGRFTISSDNVKNTVYLQMNSLKPEDTAVYFCFYQSLTAPNFGQVFMGQGTQVTVSS

SEQ ID NO: 231 - protein, 120 aa, synthetic construct
EVQLVESGGDLVQAGGSLRLSCAASGSIVSTNGMGWHRQVPGKGRELVAGIRSDGFTNYADSVKGRFTISSDNVKNTVYLQMNSLKPEDTAVYFCFYQSLTAPNFGQVFMGQGTQVTVSS

SEQ ID NO: 232 - protein, 120 aa, synthetic construct
EVQLVESGGDLVQAGGSLRLSCAASGSIVSTNGMGWHRQVPGKGRELVAGIRSDGFTNYADSVKGRFTISSDNVKNTVYLQMNSLKAEDSGVYFCYYQSLSTPNFGQTFWGQGTQVTVSS

SEQ ID NO: 233 - protein, 120 aa, synthetic construct
EVQLVESGGDLVQAGGSLRLSCAASGSIVSTNSMGWHRQVPGNRREMVAGIRSDGFINYADSVKGRFTISSDNVNNTVYLQMNSLKPEDTAVYLCFYHSLSTPNFGQLFWGQGTQVTVSS

SEQ ID NO: 234 - protein, 120 aa, synthetic construct
EVQLVESGGDLVQAGGSLRLSCAASGSIVGTNAMGWHRQVPGKGRELVAGFRSDGFTNYADSVKGRFTISSDNVKNTVYLQMNSLKAEDTAVYFCFYQSLSTPNFGRTFWGQGTQVTVSS

SEQ ID NO: 235 - protein, 120 aa, synthetic construct
EVQLVESGGDLVQAGGSLRLSCAASGSIVSTNNMGWHRQVPGKGRELVAGIRSDGFINYADSVKGRFTISSDNVNNTVYLQMNSLKPEDTAVYSCFYQSLSTPNFGQLSLGQGTQVTVSS

SEQ ID NO: 236 - protein, 120 aa, synthetic construct
EVQLVESGGDLVQAGGSLRLSCAASGSIVSTNAMGWHRQVPGKGRELVAGFRSDGFTNYADSVKGRFTISSDNVKNTVYLQMNSLKAEDTAVYFCFYQPLSTPNFGQTFWGQGTQVTVSS

SEQ ID NO: 237 - protein, 120 aa, synthetic construct
EVQLVESGGDLVQAGGSLRLSCAASGSIVSTNAMGWHRQVPGKGRELVAGFRSDGFTNYADSVKGRFTISSDNVKNTVYLQMNSLKAEDTAVYFCFYHSLSTPNFGQTFWGQGTQVTVSS

SEQ ID NO: 238 - protein, 120 aa, synthetic construct
EVQLVESGGDLVQAGGSLRLSCAASGSIVSTNAMGWHRQVPGKGRELVAGFRSDGFTNYADSVKGRFTISSDNVKNTVYLQMNSLKAEDTAVYFCFYQSLRTPNFGQTFWGQGTQVTVSS

SEQ ID NO: 239 - protein, 120 aa, synthetic construct
EVQLVESGGDLVQAGGSLRLSCAASGSIVSTNAMGWHRQVPGKGRELVAGFRSDGFTNYADSVKGRFTISSDNVKNTVYLQMNSLKAEDTAVYFCFSQSLSTPNFGQTFWGQGTQVTVSS

SEQ ID NO: 240 - protein, 120 aa, synthetic construct
EVQLVESGGDLVQAGGSLRLSCAASGSIVSTNAMGWHRQVPGKGRELVAGFRSDGFTNYADSVKGRFTISSDNVKNTVYLQMNSLKAEDTAVYFCSYQSLSTPNFGQTFWGQGTQVTVSS

SEQ ID NO: 241 - protein, 120 aa, synthetic construct
EVQLVESGGDLVQAGGSLRLSCAASGSIVSTNSMGWHRQVPGNRREMVAGIRSDGFINYADSVKGRFTISSDNVNNTVYLQMNSLKPEDTAVYLCFYQSLSTPNFGQLVWGQGTQVTVSS

SEQ ID NO: 242 - protein, 120 aa, synthetic construct
EVQLVESGGDLVQAGGSLRLSCAASGSIVSTNNMGWHRQVPGKGRELVAGIRSDGFINYADSVKGRFTISSDNVNNTVYLQMNSLKPEDTAVYSCFYHSLSTPNFGQLFLGQGTQVTVSS

SEQ ID NO: 243 - protein, 120 aa, synthetic construct
EVQLVESGGDLVQAGGSLSLSCAASGSIVSTNAMGWHRQVPGKLRELVAGIRSDGFTNYADSVKGRFTISSDDVKNTVYLQMNRLKAEDTAVYFCFYQSLTTPNFGQLFWGQGTQVTVSS

SEQ ID NO: 244 - protein, 120 aa, synthetic construct
EVQLVESGGDLVQAGGSLRLSCAASGSIVSTNAMGWHRQVPGKGRELVAGFRSDGFTNYADSVKGRFTISSDNVKNTVYLQMNSLKAEDTAVYFCFDQSLSTPNFGQTFWGQGTQVTVSS

SEQ ID NO: 245 - protein, 120 aa, synthetic construct
EVQLVESGGDLVQAGGSLRLSCAASGSIVSTNAMGWHRQVPGKGRELVAGFRSDGFTNYADSVKGRFTISSDNVKNTVYLQMNSLKAEDTAVYFCFYQSHSTPNFGQTFWGQGTQVTVSS

SEQ ID NO: 246 - protein, 120 aa, synthetic construct
EVQLVESGGDLVQAGGSLRLSCAASGSIVSTNAMGWHRQVPGKGRELVAGFRSDGFTNYADSVKGRFTISSDNVKNTVYLQMNSLKAEDTAVYFCFYQSISTPNFGQTFWGQGTQVTVSS

SEQ ID NO: 247 - protein, 120 aa, synthetic construct
EVQLVESGGDLVQAGGSLRLSCAASGSIVSTNAMGWHRQVPGKGRELVAGFRSDGFTNYADSVKGRFTISSDNVKNTVYLQMNSLKAEDTAVYFCLYQSLSTPNFGQTFWGQGTQVTVSS

SEQ ID NO: 248 - protein, 120 aa, synthetic construct
EVQLVESGGDLVQAGGSLRLSCAASGSIVSTNAMGWHRQVPGKGRELVAGFRSDGFTNYADSVKGRFTISSDNVKNTVYLQMNSLKAEDTAVYFCFYQSLSTHNFGQTFWGQGTQVTVSS

SEQ ID NO: 249 - protein, 120 aa, synthetic construct
EVQLVESGGDLVQAGGSLRLSCAASGSIVSTNSMGWHRQVPGNRREMVAGIRSDGFINYADSVKGRFTISSDNVNNTVYLQMNSLKPEDTAVYLCFYQSLSAPNFGQLFWGQGTQVTVSS

SEQ ID NO: 250 - protein, 120 aa, synthetic construct
EVQLVESGGDLVQAGGSLRLSCAASGSIVSTNSMGWHRQVPGNRREMVAGIRSDGFINYADSVKGRFTISSDNVNNTVYLQMNSLKPEDTAVYLCFYQSLSTPNFGHLFWGQGTQVTVSS

SEQ ID NO: 251 - protein, 120 aa, synthetic construct
EVQLVESGGDLVQAGGSLRLSCAASGSIVSTNNMGWHRQVPGKGRELVAGIRSDGFINYADSVKGRFTISSDNVNNTVYLQMNSLKPEDTAVYSCSYQSLSTPNFGQLFLGQGTQVTVSS

SEQ ID NO: 252 - protein, 120 aa, synthetic construct
EVQLVESGGDLVQAGGSLSLSCAASGSIVSTNAMGWHRQVPGKLRELVAGIRSDGFTNYADSVKGRFTISSDDVKNTVYLQMNRLKAEDTAVYFCFYHSLTTPNFGQVFWGQGTQVTVSS

SEQ ID NO: 253 - protein, 120 aa, synthetic construct
EVQLVESGGDLVQAGGSLRLSCAASGSIVSTNAMGWHRQVPGKRRELVAGIRSDGFTNYADSVKGRFTISSEDVKNTVYLQMNSLKAEDTAVYFCYYQSLTTPNYGQLFWGQGTQVTVSS

SEQ ID NO: 254 - protein, 120 aa, synthetic construct
EVQLVESGGDLVQAGGSLRLSCAASGSIVSTNAMGWHRQVPGKGRELVAGFRSDGFTNYADSVKGRFTISSDNVKNTVYLQMNSLRAEDTAVYFCFYQSLSTPNFDQTFWGQGTQVTVSS

SEQ ID NO: 255 - protein, 120 aa, synthetic construct
EVQLVESGGDLVQAGGSLRLSCAASGSIVSTNAMGWHRQVPGKGRELVAGFRSDGFTNYADSVKGRFTISSDNVKNTVYLQMNSLKAEDTAVYFCIYQSLSTPNFGQTFWGQGTQVTVSS

SEQ ID NO: 256 - protein, 120 aa, synthetic construct
EVQLVESGGDLVQAGGSLRLSCAASGSIVSTNGMGWHRQVPGKGRELVAGIRSDGFTNYADSVKGRFTISSDNVKNTVYLQMNSLKAEDSGVYFCYYQSLSTPNFGQLFWGQGTQVTVSS

SEQ ID NO: 257 - protein, 120 aa, synthetic construct
EVQLVESGGDLVQAGGSLSLSCAASGSIVGTNAMGWHRQVPGKLRELVAGIRSDGFTNYADSVKGRFTISSDDVKNTVYLQMNRLKAEDTAVYFCFYQSLTTPNFGQLFWGQGTQVTVSS

SEQ ID NO: 258 - protein, 120 aa, synthetic construct
EVQLVESGGDLVQAGGSLRLSCAASGSIVSTNAMGWHRQVPGKRRELVAGIRSDGFTNYADSVKDRFTISSEDVKNTVYLQMNSLKAEDTAVYFCYYQSLTTPNYGQLFWGQGTQVTVSS

SEQ ID NO: 259 - protein, 120 aa, synthetic construct
EVQLVESGGDLVQAGGSLSLSCAASGSIVSTNAMGWHRQVPGKLRELVAGIRSDGFANYADSVKGRFTISSDDVKNTVYLQMNRLKAEDTAVYFCFYQSLTTPNFGQLFWGQGTQVTVSS

SEQ ID NO: 260 - protein, 120 aa, synthetic construct
EVQLVESGGGLVQAGGSLRLSCAASGSIVSTNAMGWHRQVPGKRRELVAGIRSDGFTNYADSVKGRFTISSEDVKNTVYLQMNSLKAEDTAVYFCYYQSLTTPNYGQLFWGQGTQVTVSS

SEQ ID NO: 261 - protein, 120 aa, synthetic construct
EVQLVESGGGLVQAGGSLSLSCAASGSIVSTNAMGWHRQVPGKLRELVAGIRSDGFTNYADSVKGRFTISSDDVKNTVYLQMNRLKAEDTAVYFCFYQSLTTPNFGQLFWGQGTQVTVSS

SEQ ID NO: 262 - protein, 120 aa, synthetic construct
EVQLVESGGDLVQAGGSLRLSCAASGSIVSTNAMGWHRQVPGKGRELVAGFRSDGFTNYADSVKGRFTISSDNVKNTVYLQMNSLKAEDTAVYFCFYKSLSTPNFGQTFWGQGTQVTVSS

SEQ ID NO: 263 - protein, 120 aa, synthetic construct
EVQLVESGGDLVQAGGSLRLSCAASGSIVSTNGMGWHRQVPGKGRELVAGIRSDGFTSYADSVKGRFTISSDNVKNTVYLQMNSLKAEDTAVYFCYYQSLTTPNFGQVFWGQGTQVTVSS

SEQ ID NO: 264 - protein, 120 aa, synthetic construct
EVQLVESGGDLVQAGGSLRLSCAASGSIVSTNGMGWHRQVPGKGRELVAGIRSDGFTNYADSVKGRFTISSDNVKNTVYLQMNSLKAEDTAVYFCYHQSLTTPNFGQVFWGQGTQVTVSS

SEQ ID NO: 265 - protein, 120 aa, synthetic construct
EVQLVESGGDLVQAGGSLRLSCAASGSIVSTNSMGWHRQVPGNRREMVAGIRSDGFINYADSVKGRLTISSDNVNNTVYLQMNSLKPEDTAVYLCFYQSLGTPNFGQLFWGQGTQVTVSS

SEQ ID NO: 266 - protein, 120 aa, synthetic construct
EVQLVESGGDLVQAGGSLRLSCAASGSIVSTNSMGWHRQVPGNRREMVAGIRSDGFINYADSVKGRFTISSDNVNNTVYLQMNSLKPEDTAVYLCFYQPLSTPNFGQLFWGQGTQVTVSS

SEQ ID NO: 267 - protein, 120 aa, synthetic construct
EVQLVESGGDLVQAGGSLRLSCAASGSIVSTNSMGWHRQVPGNRREMVAGIRSDGFINYADSVKGRFTISSDNVNNTVYLQMDSLKPEDTAVYLCFYQPLSTPNFGQLFWGQGTQVTVSS

SEQ ID NO: 268 - protein, 120 aa, synthetic construct
EVQLVESGGDLVQAGGSLRLSCAASGSIVSTNSMGWHRQVPGNRREMVAGIRSDGFINYADSVKGRFTISSDNVNNTVYLQMNSLKPEDTAVYLCFYQSLSTPNFGLLFWGQGTQVTVSS

SEQ ID NO: 269 - protein, 120 aa, synthetic construct
EVQLVESGGGSVQAGGSLRLSCAASGSIFSLNGMGWYRQAPGKQRELVAGIRSDGLVNYGDSVKGRFTISGDNAKSTVYLQMNGLKPEDTADYDCYYQSLSTPNFGQTFWGQGTQVTVSS

SEQ ID NO: 270 - protein, 120 aa, synthetic construct
EVQLVESGGGSVQAGGSLRLSCAASGSIFSFNGMGWYRQAPGNTRELVAGIRSDGMANYGDSVKGRFTISGDNAKSTVYLQMNSLKPEDTADYYCYYQSLSSANFGQLFWGQGTQVTVSS

SEQ ID NO: 271 - protein, 120 aa, synthetic construct
EVQLVESGGGSVQAGGSLRLSCAASGSISSFNGMGWYRQAPGKQRELVAGIRSDGMENYGDSVKGRFTISGDNAKSTVYLQMNSLKPEDTADYYCYYQSLSSANFGQLFWGQGTQVTVSS

SEQ ID NO: 272 - protein, 120 aa, synthetic construct
EVQLVESGGGSVQAGGSLRLSCAASGSIFSLNGMGWYRQAPGKQRELVAGIRSDGLVNYGDSVKGRFTISGDNAKSTVYLQMNGLKPEDTADYDCYYQSFSSANFGQTIWGQGTQVTVSS

SEQ ID NO: 273 - protein, 120 aa, synthetic construct
EVQLVESGGGSVQAGGSLRLSCAASGSISSFNGMGWYRQAPGKQRELVAGIRSDGMENYGDSVKGGFTISGDNAKSTVYLQMNSLKPEDTADYYCYYQSLGSANFGQLFWGQGTQVTVSS

SEQ ID NO: 274 - protein, 120 aa, synthetic construct
EVQLVESGGGLVQAGGSLRLSCAASGSIRNINGMGWYRQAPGKQRELVAGIRSNSEPNYADSVKGRFTISRDNAKNAVYLQMNSLKPEDTAVYYCYYQSLSSVNWGQVFWGQGTQVTVSS

SEQ ID NO: 275 - protein, 120 aa, synthetic construct
EVQLVESGGGSVQAGGSLRLSCAASGSIFSFNAMGWYRQAPGKQRELVAGIRSNGMANYGDSVKGRFTISGDNAKSTVYLQMNSLKPEDTADYYCYYQSLGSANYGQLFWGQGTQVTVSS

SEQ ID NO: 276 - protein, 120 aa, synthetic construct
EVQLVESGGGSVQAGGSLRLSCAASGSIFSFNAMGWYRQAPGKQRELVAGIRSNGMANYGDSVKGRFTISGDNAKSTVYLQMNSLKPEDTADYYCYYHSLSSANYGQLFWGQGTQVTVSS

SEQ ID NO: 277 - protein, 120 aa, synthetic construct
EVQLVESGGGSVQAGGSLRLSCAASGSIFSFNAMGWYRQAPGKQRELVAGIRSNGMANYGDSVKGRFTISGDNAKSTVYLQMNSLKPEDTADYYCYYQSLSGANYGQLFWGQGTQVTVSS

SEQ ID NO: 278 - protein, 120 aa, synthetic construct
EVQLVESGGDLVQAGGSLRLSCAASGSIVSTNGMGWHRQVPGKGRELVAGIRSDGFTNYADSVKGRFTISSDNVKNTVYLQMNSLKAEDSGVYFCYYQALSSANYGQLFWGQGTQVTVSS

SEQ ID NO: 279 - protein, 120 aa, synthetic construct
EVQLVESGGDLVQAGGSLRLSCAASGSIVSTNSMGWHRQVPGKRRELVAGIRSDGFINYADSVKGRFTISSDNVNNTVYLQMNSLKPEDTAVYLCFYQSLSSANYGQLFWGQGTQVTVSS

SEQ ID NO: 280 - protein, 120 aa, synthetic construct
EVQLVESGGGSVQAGGSLRLSCAASGSIFSFNAMGWYRQAPGKQRELVAGIRSNGMANYGDSVKGRFTISGDNAKSTVYLQMNSLKPEDTADYYCYDQSLSSANYGQLFWGQGTQVTVSS

SEQ ID NO: 281 - protein, 120 aa, synthetic construct
EVQLVESGGGLVQAGGSLRVSCAASGSIFRADAMGWHRQVPGKPREFVAGIRSDGFTNYAEAVKGRFTISWDTVKNTVYLQMNSLKPEDTAVYTCYYQSLSSPNFGQTFWGQGTQVTVSS

SEQ ID NO: 282 - protein, 120 aa, synthetic construct
EVQLVESGGGLVQAGGSLRVSCAASGSIFRADAMGWHRQVPGKPREFVAGIRSDGFTNYAEAVKGRFTISWDTVKNTVYLQMNSLKPEDTAVYTCYYQSLSSPNFGQTIWGQGTQVTVSS

SEQ ID NO: 283 - protein, 120 aa, synthetic construct
EVQLVESGGGSVQAGGSLRLSCAASGSIFSLNGMGWYRQAPGKQRELVAGIRSDGLVNYGDSVKGRFTISGDNAKSTVYLQMNGLKPEDTADYDCYYQSFSSANFGQTFWGQGTQVTVSS

SEQ ID NO: 284 - protein, 120 aa, synthetic construct
EVQLVESGGGSVQAGGSLRLSCAASGSIFSFNAMGWYRQAPGKQRELVAGIRSNGMANYGDSVKGRFTISGDNAKSTVYLQMNSLKPEDTADYYCYYQSLSSANYGQLFWGQGTQVTVSS

SEQ ID NO: 285 - protein, 120 aa, synthetic construct
EVQLVESGGGLVQAGGSLRLSCAASGSIFSGNAMGWYRQAPGKQRELVAGIHSNGITNYADSVKGRFTISRDNVKNTVYLQMNSLKPEDTAVYYCYYQSLSSANYGQTFWGQGTQVTVSS

SEQ ID NO: 286 - protein, 120 aa, synthetic construct
EVQLVESGGGLVQAGGSLRLSCAASGSIRNINGMGWYRQAPGKQRELVAGIRSNSIANYADSVKGRFTISRDNAKNAVYLQMNSLKPEDTAVYYCYYQSLSSVNWGQVFWGQGTQVTVSS

SEQ ID NO: 287 - protein, 120 aa, synthetic construct
EVQLVESGGDLVQAGGSLRVSCAASGSIFRTDAMGWHRQVPGKQREFVAGIRSDGYTNYADSVKGRFTISRDTVKNTVYLQMNSLKPEDTAVYSCYYQSLSSPNFGQTFWGQGTQVTVSS

SEQ ID NO: 288 - protein, 120 aa, synthetic construct
EVQLVESGGDLVQAGGSLRLSCAASGSIVSTNGMGWHRQVPGKGRELVAGIRSDGFTNYADSVKGRFTISSDNVKNTVYLQMNSLKAEDSGVYFCYYQALSSPNFGQLFWGQGTQVTVSS

SEQ ID NO: 289 - protein, 120 aa, synthetic construct
EVQLVESGGGLVQAGGSQRLSCAASGSIFSFNGMGWYRQAPGKQRELVAGIRSNGLANYGDSVKGRFTISRDNAKNTVYLRMNSLKPEDTADYYCYYQSFNSANYGQLFWGQGTQVTVSS

SEQ ID NO: 290 - protein, 120 aa, synthetic construct
EVQLVESGGGSVQAGGSLRLSCAASGSINSSNGMGWYRQAPGKQRELVAGIRSDGMANYGDSVKGRFTISGDNAKSTVYLQMNALKPEDTADYSCYYQSLSSANFGQLFWGQGTQVTVSS

SEQ ID NO: 291 - protein, 120 aa, synthetic construct
EVQLVESGGGSVQAGGSLRLSCAASGSIFSFNAMGWYRQAPGKQRELVAGIRSNGMANYGDSVKGRFTISGDNAKSTVYLQMNSLKPEDTADYYCYYQSLRSANYGQLFWGQGTQVTVSS

SEQ ID NO: 292 - protein, 120 aa, synthetic construct
EVQLVESGGGSVQAGGSLRLSCAASGSIFSFNAMGWYRQAPGKQRELVAGIRSNGMANYGDSVKGRFTISGDNAKSTVYLQMNSLKPEDTADYYCYYQSLSSADYGQLFWGQGTQVTVSS

SEQ ID NO: 293 - protein, 120 aa, synthetic construct
EVQLVESGGGSVQAGGSLRLSCAASGSIFSFNAMGWYRQAPGKQRELVAGIRSNGMANYGDSVKGRFTISGDNAKSTVYLQMNSLKPEDTADYYCYYQSLSSASYGQLFWGQGTQVTVSS

SEQ ID NO: 294 - protein, 120 aa, synthetic construct
EVQLVESGGGSVQAGGSLRLSCAASGSIFSFNAMGWYRQAPGKQRELVAGIRSNGMANYGDSVKGRFTISGDNAKSTVYLQMNSLKPEDTADYYCYSQSLSSANYGQLFWGQGTQVTVSS

SEQ ID NO: 295 - protein, 120 aa, synthetic construct
EVQLVESGGGLVQAGGSLRLSCAASGSIFSFNAMGWYRQAPGKQRELVAGIRSNGMANYGDSVKGRFTISGDNAKSTVYLQMNSLKPEDTADYYCYYQSLSGANYGQLFWGQGTQVTVSS

SEQ ID NO: 296 - protein, 120 aa, synthetic construct
EVQLVESGGDLVQAGGSLRLSCAASGSIFSFNAMGWYRQAPGKQRELVAGIRSNGMANYGDSVKGRFTISGDNAKSTVYLQMNSLKPEDTADYYCYYQSLSGANYGQLFWGQGTQVTVSS

SEQ ID NO: 297 - protein, 120 aa, synthetic construct
EVQLVESGGGLVQAGGSLRLSCAASGGIFSGNAMGWYRQAPGKQRELVAGIHSNGITNYADSVKGRFTISRDNVKNTVYLQMNSLKPEDTAVYYCYYQSLSSANYGQTFWGQGTQVTVSS

SEQ ID NO: 298 - protein, 120 aa, synthetic construct
EVQLVESGGGSVQAGGSLRLSCAASGSISSFNGMGWYRQAPGKQRELVAGIRSDGMENYGDSVKGRFTISGDNAKSTVYLQMSSLKPEDTADYYCYYQSLSSANFGQLFWGQGTQVTVSS

SEQ ID NO: 299 - protein, 120 aa, synthetic construct
EVQLVESGGDLVQAGGSLRLSCAASGSIRNINGMGWYRQAPGKQRELVAGIRSNSEPNYADSVKGRFTISRDNAKNAVYLQMNSLKPEDTAVYYCYYQSLSSVNWGQVFWGQGTQVTVSS

SEQ ID NO: 300 - protein, 120 aa, synthetic construct
EVQLVESGGGLVQAGGSLRLSCAASGSIFSANGMGWYRQAPGKQRELVAGIRTNEIANYGDSVKGRFTISRDNAKNTVYLQMNILKPEDTADYYCYYQSLSSANYGQLFWGQGTQVTVSS

SEQ ID NO: 301 - protein, 120 aa, synthetic construct
EVQLVESGGDLVQAGGSLRLSCAASGSIVSTNGMGWHRQVPGKGRELVAGIRSDGFTNYADSVKGRFTISSDNVKNTVYLQMNSLKAEDSGVYFCYYQALSTPNYGQVFWGQGTQVTVSS

SEQ ID NO: 302 - protein, 120 aa, synthetic construct
EVQLVESGGGLVQAGGSLRLSCAASGSIVSTNGMGWHRQVPGKGRELVAGIRSDGFTNYADSVKGRFTISSDNVKNTVYLQMNSLKAEDSGVYFCYYQALSTPNYGQVFWGQGTQVTVSS

SEQ ID NO: 303 - protein, 120 aa, synthetic construct
EVQLVESGGDLVQAGGSLRLSCAASGSIVSTNGMGWHRQVPGKGRELVAGIRSDGFTNYADSVKGRFTISSDNVKNTVYLQMNSLKAEDSGVYFCYYQALSTPNFGQTFWGQGTQVTVSS

SEQ ID NO: 304 - protein, 120 aa, synthetic construct
EVQLVESGGDLVQAGGSLRLSCAASGSIVSTNGMGWHRQVPGKGRELVAGIRSDGFTNYADSVKGRFTISSDNVKNTVYLQMNSLKAEDSGVYFCYYQALSTPNYGQTIWGQGTQVTVSS

SEQ ID NO: 305 - protein, 120 aa, synthetic construct
EVQLVESGGDLVQAGGSLRLSCAASGSIVSTNGMGWHRQVPGKGRELVAGIRSDGFTNYADSVKGRFTISSDNVKNTVYLQMNSLKAEDSGVYFCYYQALSTPNFGQTIWGQGTQVTVSS

SEQ ID NO: 306 - protein, 120 aa, synthetic construct
EVQLVESGGGSVQAGGSLRLSCAASGSIVSTNGMGWHRQVPGKGRELVAGIRSDGFTNYADSVKGRFTISSDNVKNTVYLQMNSLKAEDSGVYFCYYQALSTPNYGQVFWGQGTQVTVSS

SEQ ID NO: 307 - protein, 120 aa, synthetic construct
EVQLVESGGDLVQAGGSLRLSCAASGSIVSTNGMGWHRQVPGKGRELVAGIRSDGFTNYADSVKGRFTISSDNVKNTVYLQMNSLKAEDSGVYFCYYQALSSPNYGHVFWGQGTQVTVSS

SEQ ID NO: 308 - protein, 120 aa, synthetic construct
EVQLVESGGDLVQAGGSLRLSCAASGSIVSTNGMGWHRQVPGKGRELVAGIRSDGFTNYADSVKGRFTISSDNVKNTVYLQMNSLKAEDSGVYFCYYQALGSPNYGQVFWGQGTQVTVSS

SEQ ID NO: 309 - protein, 120 aa, synthetic construct
EVQLVESGGDLVQAGGSLRLSCAASGSIVSTNGMGWHRQVPGKGRELVAGIRSDGFTNYADSVKGRFTISSDNVKNTVYLQMNSLKAEDSGVYFCYYQALSSPNFGQVFWGQGTQVTVSS

SEQ ID NO: 310 - protein, 120 aa, synthetic construct
EVQLVESGGDLVQAGGSLRLSCAASGSIVSTNGMGWHRQVPGKGRELVAGIRSDGFTNYADSVKGRFTISSDNVKNTVYLQMNSLKAEDSGVYFCYDQALSTPNSGQVFWGQGTQVTVSS

SEQ ID NO: 311 - protein, 120 aa, synthetic construct
EVQLVESGGGLVQAGGSLRLSCAASGRRFSSNAMGWHRQVPGNQRELVAGIRSDGYTNYAASVKGRFTISSDNVNNTVYLQMNSLKPEDTAVYSCYYQSLSTPNYGQVSWGQGTQVTVSS

SEQ ID NO: 312 - protein, 120 aa, synthetic construct
EVQLVESGGGLVQAGGSLRLSCAASGRRFSSNAMGWHRQVPGNQRELVAGIRSDGYTNYAASVKGRFTISSDNVNNTVYLQMNSLKPEDTAVYSCYYQSLSTPNYGQVLWGQGTQVTVSS

SEQ ID NO: 313 - protein, 120 aa, synthetic construct
EVQLVESGGDLVQAGGSLRLSCAASGSIVSTNGMGWHRQVPGKGRELVAGIRSDGFTNYADSVKGRFTISSDNVKNTVYLQMNSLKAEDSGVYFCYYQALSSANYGQVFWGQGTQVTVSS

SEQ ID NO: 314 - protein, 120 aa, synthetic construct
EVQLVESGGDLVQAGGSLRLSCAASGSIVSTNGMGWHRQVPGKGRELVAGIRSDGFTNYADSVKGRFTISSDNVKNTVYLQMNSLKAEDSGVYFCYYQALSTPNFGQLFWGQGTQVTVSS

SEQ ID NO: 315 - protein, 120 aa, synthetic construct
EVQLVESGGDLVQAGGSLRLSCAASGSIVSTNSMGWHRQVPGKRRELVAGIRSDGFINYADSVKGRFTISSDNVNNTVYLQMNSLKPEDTAVYLCFYQTLSTPNYGQVFWGQGTQVTVSS

SEQ ID NO: 316 - protein, 120 aa, synthetic construct
EVQLVESGGGSVQAGGSLRLSCAASGSIFSLNGMGWHRQAPGKQRELVAGIRSDGMVNYGDSVKGRFTISGDNAKSTVYLQMNSLKPEDTADYYCYYQALSSANYGQVFWGQGTQVTVSS

SEQ ID NO: 317 - protein, 120 aa, synthetic construct
EVQLVESGGGLVQAGGSLRLSCAASGRRFSANAMGWHRQVPGNQRELVAGMQSNGYTNYAASVKGRFTISSDNVNNTVYLQMNSLKPEDTAVYYCYYQSLSTPNYGQVYWGQGTQVTVSS

SEQ ID NO: 318 - protein, 120 aa, synthetic construct
EVQLVESGGDLVQAGGSLRLSCAASGSIVSTNGMGWHRQVPGKGRELVAGIRSDGFTNYADSVKGRFTISSDNVKNTVYLQMNSLKAEDSGVYFCYYQALSSPTYGQPFWGQGTQVTVSS

SEQ ID NO: 319 - protein, 120 aa, synthetic construct
EVQLVESGGDLVQAGGSLRLSCAASGSIVSTNGMGWHRQVPGKGRELVAGIRSDGFTNYADSVKGRFTISSDNVKNTVYLQMNSLKAEDSGVYFCYYQALSTPNSGQTFWGQGTQVTVSS

SEQ ID NO: 320 - protein, 120 aa, synthetic construct
EVQLVESGGDLVQAGGSLRLSCAASGSIVSTNGMGWHRQVPGKGRELVAGIRSDGFTNYADSVKGRFTISSDNVKNTVYLQMNSLKAEDSGVYFCYYQALSTPNYGQTYWGQGTQVTVSS

SEQ ID NO: 321 - protein, 120 aa, synthetic construct
EVQLVESGGDLVQAGGSLRLSCAASGSIVSTNGMGWHRQVPGKGRELVAGIRSDGFTNYADSVKGRFTISSDNVKNTVYLQMNSLKAEDSGVYFCYYQAISSPNYGQVFWGQGTQVTVSS

SEQ ID NO: 322 - protein, 120 aa, synthetic construct
EVQLVESGGDLVQAGGSLRLSCAASGSIVSTNGMGWHRQVPGKGRELVAGIRSDGFTNYADSVKGRFTISSDNVKNTVYLQMNSLKAEDSGVYFCYYHALSTPNSGQVFWGQGTQVTVSS

SEQ ID NO: 323 - protein, 120 aa, synthetic construct
EVQLVESGGDLVQAGGSLRLSCAASGSIVSTNGMGWHRQVPGKGRELVAGIRSDGFTNYADSVKGRFTISSDNVKNTVYLQMNSLKAEDSGVYFCYYQALSTPKSGQVFWGQGTQVTVSS

SEQ ID NO: 324 - protein, 120 aa, synthetic construct
EVQLVESGGDLVQAGGSLRLSCAASGSIVSTNGMGWHRQVPGKGRELVAGIRSDGFTNYADSVKGRFTISSDNVKNTVYLQMNSLKAEDSGVYFCYYQALSTPHSGQVFWGQGTQVTVSS

SEQ ID NO: 325 - protein, 120 aa, synthetic construct
EVQLVESGGDLVQAGGSLRLSCAASGSIVSTNSMGWHRQVPGKGRELVAGIRSDGFINYADSVKGRFTISSDNVNNTVYLQMNSLKPEDTAVYLCFYQPLSTPNYGQVFWGQGTQVTVSS

SEQ ID NO: 326 - protein, 120 aa, synthetic construct
EVQLVESGGDLVQAGGSLRLSCAASGSIVSTNSMGWHRQVPGKRRELVAGIRSDGFINYADSVKGRFTISSDNVNNTVYLQMNSLKPEDTAVYLCFYQPLSTPNYGQVFWGQGTQVTVSS

SEQ ID NO: 327 - protein, 120 aa, synthetic construct
EVQLVESGGGLVQAGGSLRLSCAASGRRFSANAMGWHRQVPGNQRELVAGINSNGYTNYAASVKGRFTISSDNVNNTVYLQMNSLKPEDTAVYYCYYQSLSTPNYGRVFWGQGTQVTVSS

SEQ ID NO: 328 - protein, 120 aa, synthetic construct
EVQLVESGGGLVQAGGSLRLSCAASGRRFSANAMGWHRQVPGNQRELVAGMQSNGYTNYAASVKGRFTISSDNVNNTVYLQMNSLKPEDTAVYYCYYQSLSTPNSGQVFWGQGTQVTVSS

SEQ ID NO: 329 - protein, 120 aa, synthetic construct
EVQLVESGGDLVQAGGSLRLSCAASGRRFSSNAMGWHRQVPGNQRELVAGIRSDGYTNYAASVKGRFTISSDNVNNTVYLQMNSLKPEDTAVYSCYYQSLSTPNYGQVLWGQGTQVTVSS

SEQ ID NO: 330 - protein, 120 aa, synthetic construct
EVQLVESGGDLVQAGGSLRLSCAASGSIVSTKAMGWHRQVPGKRRELVAGIRSDGFTNYADSVKGRFTISSDSVNDTVYLQMNSLKAEDTAVYFCFYQALSTPNYGQTFWGQGTQVTVSS

SEQ ID NO: 331 - protein, 120 aa, synthetic construct
EVQLVESGGDLVQAGGSLRLSCAASGSIVSTNAMGWHRQVPGKGRELVAGFRSDGFTNYADSVKGRFTISSDNVKNTVYLQMNSLKAEDTAVYFCFYQALSTPNFGQTFWGQGTQVTVSS

SEQ ID NO: 332 - protein, 120 aa, synthetic construct
EVQLVESGGDLVQAGGSLRLSCAASGSIVSTNGMGWHRQVPGKGRELVAGIRSDGFTNYADSVKGRFTISSDNVKNTVYLQMNSLKAEDSGVYFCYYQALSSPHYGQPFWGQGTQVTVSS

SEQ ID NO: 333 - protein, 120 aa, synthetic construct
EVQLVESGGDLVQAGGSLRLSCAASGSIVSTNGMGWHRQVPGKGRELVAGIRSDGFTNYADSVKGRFTISSDNVKNTVYLQMNSLKAEDSGVYFCYYQAHSSPNYGQPFWGQGTQVTVSS

SEQ ID NO: 334 - protein, 120 aa, synthetic construct
EVQLVESGGDLVQAGGSLRLSCAASGSIVSTNGMGWHRQVPGKGRELVAGIRSDGFTNYADSVKGRFTISSDNVKNTVYLQMNSLKAEDSGVYFCYYQALSSPNYGQPYWGQGTQVTVSS

SEQ ID NO: 335 - protein, 120 aa, synthetic construct
EVQLVESGGDLVQAGGSLRLSCAASGSIVSTNGMGWHRQVPGKGRELVAGIRSDGFTNYADSVKGRFTISSDNVKNTVYLQMNSLKAEDSGVYFCYYQALGSPNYGQPFWGQGTQVTVSS

SEQ ID NO: 336 - protein, 120 aa, synthetic construct
EVQLVESGGDLVQAGGSLRLSCAASGSIVSTNGMGWHRQVPGKGRELVAGIRSDGFTNYADSVKGRFTISSDNVKNTVYLQMNSLKAEDSGVYFCYYQALSSPSYGQVFWGQGTQVTVSS

SEQ ID NO: 337 - protein, 120 aa, synthetic construct
EVQLVESGGDLVQAGGSLRLSCAASGSIVSTNGMGWHRQVPGKGRELVAGIRSDGFTNYADSVKGRFTISSDNVKNTVYLQMNSLKAEDSGVYFCYYQALSAPNYSQVFWGQGTQVTVSS

SEQ ID NO: 338 - protein, 120 aa, synthetic construct
EVQLVESGGDLVQAGGSLRLSCAASGSIVSTNGMGWHRQVPGKGRELVAGIRSDGFTNYADSVKGRFTISSDNVKNTVYLQMNSLKAEDSGVYFCYYQALSSPNSGQVFWGQGTQVTVSS

SEQ ID NO: 339 - protein, 120 aa, synthetic construct
EVQLVESGGDLVQAGGSLRLSCAASGSIVSTNGMGWHRQVPGKGRELVAGIRSDGFTNYADSVKGRFTISSDNVKNTVYLQMNSLKAEDSGVYFCYYQALSSPNYGRVFWGQGTQVTVSS

SEQ ID NO: 340 - protein, 120 aa, synthetic construct
EVQLVESGGDLVQAGGSLRLSCAASGSIVSTNGMGWHRQVPGKGRELVAGIRSDGFTNYADSVKGRFTISSDNVKNTVYLQMNSLKAEDSGVYFCYDQALSTPNDGQVFWGQGTQVTVSS

SEQ ID NO: 341 - protein, 120 aa, synthetic construct
EVQLVESGGDLVQAGGSLRLSCAASGSIVSTNGMGWHRQVPGKGRELVAGIRSDGFTNYADSVKGRFTISSDNVKNTVYLQMNSLKAEDSGVYFCYYQALSTPTDGQVFWGQGTQVTVSS

SEQ ID NO: 342 - protein, 120 aa, synthetic construct
EVQLVESGGDLVQAGGSLRLSCAASGSIVSTNGMGWHRQVPGKGRELVAGIRSDGFTNYADSVKGRFTISSDNVKNTVYLQMNSLKAEDSGVYFCSYQALSTPNSGQVFWGQGTQVTVSS

SEQ ID NO: 343 - protein, 120 aa, synthetic construct
EVQLVESGGDLVQAGGSLRLSCAASGSIVSTNGMGWHRQVPGKGRELVAGIRSDGFTNYADSVKGRFTISSDNVKNTVYLQMNSLKAEDSGVYFCYDQALSTPNYGHVFWGQGTQVTVSS

SEQ ID NO: 344 - protein, 120 aa, synthetic construct
EVQLVESGGDLVQAGGSLRLSCAASGSIVSTNGMGWHRQVPGKGRELVAGIRSDGFTNYADSVKGRFTISSDNVKNTVYLQMNSLKAEDSGVYFCYYQALSTPTSGQVFWGQGTQVTVSS

SEQ ID NO: 345 - protein, 120 aa, synthetic construct
EVQLVESGGDLVQAGGSLRLSCAASGSIVSTNGMGWHRQVPGKGRELVAGIRSDGFTNYADSVKGRFTISSDNVKNTVYLQMNSLKAEDSGVYFCYYQALSTPNDGHVFWGQGTQVTVSS

SEQ ID NO: 346 - protein, 120 aa, synthetic construct
EVQLVESGGDLVQAGGSLRLSCAASGSIVSTNGMGWHRQVPGKGRELVAGIRSDGFTNYADSVKGRFTISSDNVKNTVYLQMNSLKAEDSGVYFCYSQALSTPKYGQVFWGQGTQVTVSS

SEQ ID NO: 347 - protein, 120 aa, synthetic construct
EVQLVESGGDLVQAGGSLRLSCAASGSIVSTNSMGWHRQVPGKRRELVAGIRSDGFINYADSVKGRFTISSDNVNNTVYLQMNSLKPEDTAVYLCSYQSLSTPNYGQVFWGQGTQVTVSS

SEQ ID NO: 348 - protein, 120 aa, synthetic construct
EVQLVESGGDLVQAGGSLRLSCAASGSIVSTNSMGWHRQVPGKRRELVAGIRSDGFINYADSVKGRFTISSDNVNNTVYLQMNSLKPEDTAVYLCLYQSLSTPNYGQVFWGQGTQVTVSS

SEQ ID NO: 349 - protein, 120 aa, synthetic construct
EVQLVESGGGLVQAGGSLRLSCAASGRRFSANAMGWHRQVPGNQRELVAGINSNGYTNYAASVKGRFTISSDNVNNTVYLQMNSLKPEDTAVYYCYYQSLSTPNYGQVFWGQGTQVTVSS

SEQ ID NO: 350 - protein, 120 aa, synthetic construct
EVQLVESGGGLVQAGGSLRLSCAAPGRRFSTNAMGWHRQVPGNQRELVAGINSNGYTNYAASVKGRFTISSDNVNNTVYLQMNSLKPEDTAVYYCYYQSLSTPDYGQVFWGQGTQVTVSS

SEQ ID NO: 351 - protein, 120 aa, synthetic construct
EVQLVESGGGLVQAGGSLRLSCAASGRRFSANAMGWHRQVPGNQRELVAGINSNGYTNYAASVKGRFTISSDNVNNTVYLQMNSLKPEDTAVYYCYYQSLSTPNSGQVFWGQGTQVTVSS

SEQ ID NO: 352 - protein, 120 aa, synthetic construct
EVQLVESGGDLVQAGGSLRLSCAASGSIVSTNGMGWHRQVPGKGRELVAGIRSDGFTNYADSVKGRFTISSDNVKNTVYLQMNSLKAEDSGVYFCYDQALSSPNYGQPFWGQGTQVTVSS

SEQ ID NO: 353 - protein, 120 aa, synthetic construct
EVQLVESGGDLVQAGGSLRLSCAASGSIVSTNGMGWHRQVPGKGRELVAGIRSDGFTNYADSVKGRFTISSDNVKNTVYLQMNSLKAEDSGVYFCYDQALSSPNSGQTFWGQGTQVTVSS

SEQ ID NO: 354 - protein, 120 aa, synthetic construct
EVQLVESGGDLVQAGGSLRLSCAASGSIVSTNGMGWHRQVPGKGRELVAGIRSDGFTNYADSVKGRFTISSDNVKNTVYLQMNSLKAEDSGVYFCYYQALRSPNSGQTFWGQGTQVTVSS

SEQ ID NO: 355 - protein, 120 aa, synthetic construct
EVQLVESGGDLVQAGGSLRLSCAASGSIVSTNGMGWHRQVPGKGRELVAGIRSDGFTNYADSVKGRFTISSDNVKNTVYLQMNSLKAEDSGVYFCYDQALSSPNDGQTFWGQGTQVTVSS

SEQ ID NO: 356 - protein, 120 aa, synthetic construct
EVQLVESGGDLVQAGGSLRLSCAASGSIVSTNGMGWHRQVPGKGRELVAGIRSDGFTNYADSVKGRFTISSDNVKNTVYLQMNSLKAEDSGVYFCYYQALRSPKYGQTFWGQGTQVTVSS

SEQ ID NO: 357 - protein, 120 aa, synthetic construct
EVQLVESGGDLVQAGGSLRLSCAASGSIVSTNGMGWHRQVPGKGRELVAGIRSDGFTNYADSVKGRFTISSDNVKNTVYLQMNSLKAEDSGVYFCYSQALSSPNSGQTFWGQGTQVTVSS

SEQ ID NO: 358 - protein, 120 aa, synthetic construct
EVQLVESGGDLVQAGGSLRLSCAASGSIVSTNGMGWHRQVPGKGRELVAGIRSDGFTNYADSVKGRFTISSDNVKNTVYLQMNSLKAEDSGVYFCYDQALSSPNYGHTFWGQGTQVTVSS

SEQ ID NO: 359 - protein, 120 aa, synthetic construct
EVQLVESGGDLVQAGGSLRLSCAASGSIVSTNGMGWHRQVPGKGRELVAGIRSDGFTNYADSVKGRFTISSDNVKNTVYLQMNSLKAEDSGVYFCYSQALSSPKYGQTFWGQGTQVTVSS

SEQ ID NO: 360 - protein, 120 aa, synthetic construct
EVQLVESGGDLVQAGGSLRLSCAASGSIVSTNGMGWHRQVPGKGRELVAGIRSDGFTNYADSVKGRFTISSDNVKNTVYLQMNSLKAEDSGVYFCYSQALSSPTYGQTFWGQGTQVTVSS

SEQ ID NO: 361 - protein, 120 aa, synthetic construct
EVQLVESGGDLVQAGGSLRLSCAASGSIVSTNGMGWHRQVPGKGRELVAGIRSDGFTNYADSVKGRFTISSDNVKNTVYLQMNSLKAEDSGVYFCYDQALRSPNYGQTFWGQGTQVTVSS

SEQ ID NO: 362 - protein, 120 aa, synthetic construct
EVQLVESGGDLVQAGGSLRLSCAASGSIVSTNGMGWHRQVPGKGRELVAGIRSDGFTNYADSVKGRFTISSDNVKNTVYLQMNSLKAEDSGVYFCYYQALRSPNYGQPFWGQGTQVTVSS

SEQ ID NO: 363 - protein, 120 aa, synthetic construct
EVQLVESGGDLVQAGGSLRLSCAASGSIVSTNGMGWHRQVPGKGRELVAGIRSDGFTNYADSVKGRFTISSDNVKNTVYLQMNSLKAEDSGVYFCYYQALGSPNYGHTFWGQGTQVTVSS

SEQ ID NO: 364 - protein, 120 aa, synthetic construct
EVQLVESGGGLVQAGGSLRVSCAASGSIFRADAMGWHRQVPGKPREFVAGIRSDGFTNYAEAVKGRFTISWDTVKNTVYLQMNSLKPEDTAVYTCYYHSLSSPSYGQVFWGQGTQVTVSS

SEQ ID NO: 365 - protein, 120 aa, synthetic construct
EVQLVESGGDLVQAGGSLRVSCAASGSIFRTDAMGWHRQVPGKQREFVAGIRSDGYTNYADSVKGRFTISRDTVKNTVYLQMNSLKPEDTAVYSCYYHSLSSPNYAQVFWGQGTQVTVSS

SEQ ID NO: 366 - protein, 120 aa, synthetic construct
EVQLVESGGGLVQAGGSLRASCAASGSIFRADAMGWHRQVPGKPREFVAGIRSDGFTNYAEAVKGRFTISWDTVKNTVYLQMNSLKPEDTAVYTCYYHSLSSPNYGQAFWGQGTQVTVSS

SEQ ID NO: 367 - protein, 120 aa, synthetic construct
EVQLVESGGGLVQAGGSLRVSCAASGSIFRADAMGWHRQVPGKPREFVAGIRSDGFTNYAEAVKGRFTISWDTVKNTVYLQMNSLKPEDTAVYTCYSHSLSSPNYGQVFWGQGTQVTVSS

SEQ ID NO: 368 - protein, 120 aa, synthetic construct
EVQLVESGGGLVQAGGSLRVSCAASGSIFRADAMGWHRQVPGKPREFVAGIRSDGFTNYAEAVKGRFTISWDTVKNTVYLQMNSLKPEDTAVYTCYYHSLSSPKYGQVFWGQGTQVTVSS

SEQ ID NO: 369 - protein, 120 aa, synthetic construct
EVQLVESGGGSVQAGGSLRLSCAASGSIFSLNGMGWYRQAPGKQRELVAGIRSDGMVNYGDSVKGRFTISGDNAKSTVYLQMNSLKPEDTADYYCYSQSLSSANYGQVFWGQGTQVTVSS

SEQ ID NO: 370 - protein, 120 aa, synthetic construct
EVQLVESGGDLVQAGGSLRLSCAASGSIVSTNGMGWHRQVPGKGRELVAGIRSDGFTNYADSVKGRFTISSDNVKNTVYLQMNSLKAEDSGVYFCYYQALSSPKSGQTFWGQGTQVTVSS

SEQ ID NO: 371 - protein, 120 aa, synthetic construct
EVQLVESGGDLVQAGGSLRLSCAASGSIVSTNGMGWHRQVPGKGRELVAGIRSDGFTNYADSVKGRFTISSDNVKNTVYLQMNSLKAEDSGVYFCYYQALSSPNSGQPFWGQGTQVTVSS

SEQ ID NO: 372 - protein, 120 aa, synthetic construct
EVQLVESGGDLVQAGGSLRLSCAASGSIVSTNGMGWHRQVPGKGRELVAGIRSDGFTNYADSVKGRFTISSDNVKNTVYLQMNSLKAEDSGVYFCYYHALSSPNSGQTFWGQGTQVTVSS

SEQ ID NO: 373 - protein, 120 aa, synthetic construct
EVQLVESGGDLVQAGGSLRLSCAASGSIVSTNGMGWHRQVPGKGRELVAGIRSDGFTNYADSVKGRFTISSDNVKNTVYLQMNSLKAEDSGVYFCYYHALSSPNYGQPFWGQGTQVTVSS

SEQ ID NO: 374 - protein, 120 aa, synthetic construct
EVQLVESGGDLVQAGGSLRLSCAASGSIVSTNGMGWHRQVPGKGRELVAGIRSDGFTNYADSVKGRFTISSDNVKNTVYLQMNSLKAEDSGVYFCYYQALSSPTSGQTFWGQGTQVTVSS

SEQ ID NO: 375 - protein, 120 aa, synthetic construct
EVQLVESGGGLVQAGGSLRVSCAASGSIFRADAMGWHRQVPGKPREFVAGIRSDGFTNYAEAVKGRFTISWDTVKNTVYLQMNSLKPEDTAVYTCYYHSLSSPNSGQVFWGQGTQVTVSS

SEQ ID NO: 376 - protein, 120 aa, synthetic construct
EVQLVESGGDLVQAGGSLRLSCAASGSIVSTNGMGWHRQVPGKGRELVAGIRSDGFTNYADSVKGRFTISSDNVKNTVYLQMNSLKAEDSGVYFCYYQALSSPTDGQTFWGQGTQVTVSS

SEQ ID NO: 377 - protein, 120 aa, synthetic construct
EVQLVESGGDLVQAGGSLRLSCAASGSIVSTNGMGWHRQVPGKGRELVAGIRSDGFTNYADSVKGRFTISSDNVKNTVYLQMNSLKAEDSGVYFCYYQAHSSPNSGQTFWGQGTQVTVSS

SEQ ID NO: 378 - protein, 120 aa, synthetic construct
EVQLVESGGDLVQAGGSLRLSCAASGSIVSTNGMGWHRQVPGKGRELVAGIRSDGFTNYADSVKGRFTISSDNVKNTVYLQMNSLKAEDSGVYFCYYQALSSPNSGHTFWGQGTQVTVSS

SEQ ID NO: 379 - protein, 120 aa, synthetic construct
EVQLVESGGDLVQAGGSLRLSCAASGSIVSTNGMGWHRQVPGKGRELVAGIRSDGFTNYADSVKGRFTISSDNVKNTVYLQMNSLKAEDSGVYFCYYQALSSPHSGQTFWGQGTQVTVSS

SEQ ID NO: 380 - protein, 120 aa, synthetic construct
EVQLVESGGDLVQAGGSLRLSCAASGSIVSTNGMGWHRQVPGKGRELVAGIRSDGFTNYADSVKGRFTISSDNVKNTVYLQMNSLKAEDSGVYFCYYQALSSPNSGQTYWGQGTQVTVSS

SEQ ID NO: 381 - protein, 120 aa, synthetic construct
EVQLVESGGDLVQAGGSLRLSCAASGSIVSTNGMGWHRQVPGKGRELVAGIRSDGFTNYADSVKGRFTISSDNVKNTVYLQMNSLKAEDSGVYFCYYQALSSPKYGQPFWGQGTQVTVSS

SEQ ID NO: 382 - protein, 120 aa, synthetic construct
EVQLVESGGDLVQAGGSLRLSCAASGSIVSTNGMGWHRQVPGKGRELVAGIRSDGFTNYADSVKGRFTISSDNVKNTVYLQMNSLKAEDSGVYFCYYQALSSPNDGHTFWGQGTQVTVSS

SEQ ID NO: 383 - protein, 120 aa, synthetic construct
EVQLVESGGDLVQAGGSLRLSCAASGSIVSTNGMGWHRQVPGKGRELVAGIRSDGFTNYADSVKGRFTISSDNVKNTVYLQMNSLKAEDSGVYFCYYQALSSPKYGHTFWGQGTQVTVSS

SEQ ID NO: 384 - protein, 120 aa, synthetic construct
EVQLVESGGDLVQAGGSLRLSCAASGSIVSTNGMGWHRQVPGKGRELVAGIRSDGFTNYADSVKGRFTISSDNVKNTVYLQMNSLKAEDSGVYFCYYQALSSPKYGQTYWGQGTQVTVSS

SEQ ID NO: 385 - protein, 120 aa, synthetic construct
EVQLVESGGDLVQAGGSLRLSCAASGSIVSTNGMGWHRQVPGKGRELVAGIRSDGFTNYADSVKGRFTISSDNDKNTVYLQMNSLKAEDSGVYFCYYQALSSPNYSRTFWGQGTQVTVSS

SEQ ID NO: 386 - protein, 120 aa, synthetic construct
EVQLVESGGGSVQAGGSLRLSCAASGSIFSLNGMGWYRQAPGKQRELVAGIRSDGLVNYGDSVKGRFTISGDNAKSTVYLQMNGLKPEDTADYDCYYQSFSGADYGQVFWGQGTQVTVSS

SEQ ID NO: 387 - protein, 120 aa, synthetic construct
EVQLVESGGGSVQAGGSLRLSCAASGSIFSLNGMGWYRQAPGKQRELVAGIRSNDMANYGDSVKGRFTISGDNAKSTVYLQMNSLKPEDTADYYCYYQSLSGANYGQVFWGQGTLVTVSS

SEQ ID NO: 388 - protein, 120 aa, synthetic construct
EVQLVESGGGSVQAGGSLRLSCAASGSIFSLNGMGWYRQAPGKQRELVAGIRSDGLVNYGDSVKGRFTISGDNAKSTVYLQMNGLKPEDTADYDCYYQSFSSANYGQTIWGQGTQVTVSS

SEQ ID NO: 389 - protein, 120 aa, synthetic construct
EVQLVESGGGSVQAGGSLRLSCAASGSIFSLNAMGWYRQAPGKQRELVAGIRSNGMANYGDSVKGRFTISGDNAKSTVYLQMNSLKPEDTADYYCYYQSFSSDNYGQTFWGQGTQVTVSS

SEQ ID NO: 390 - protein, 120 aa, synthetic construct
EVQLVESGGGSVQAGGSLRLSCAASGSIFSLNGMGWYRQAPGKQRELVAGIRSDGLVNYGDSVKGRFTISGDNAKSTVYLQMNGLKPEDTADYDCYYQSFSTPNFGQTFWGQGTQVTVSS

SEQ ID NO: 391 - protein, 120 aa, synthetic construct
EVQLVESGGGSVQAGGSLRLSCAASGSIFSLNGMGWYRQAPGKQRELVAGIRSDGLVNYGDSVKGRFTISGDNAKSTVYLQMNGLKPEDTADYDCYYQSFSTPNFGQTIWGQGTQVTVSS

SEQ ID NO: 392 - protein, 123 aa, synthetic construct
EVQLVESGGGLVQPGGSLRLSCAASGFTFDGIAMTWVRQAPGKGLEWVSSIYSYGPNTYYADSVKGRFTISTDSAKNTLYLQMNSLKPEDTAVYYCAADSDLSTVVVGPHDYWGQGTQVTVSS

SEQ ID NO: 393 - protein, 123 aa, synthetic construct
EVQLVESGGGLAQPGGSLRLSCAASGFTFDDIAMTWVRQAPGKGLEWVSSIYSYGPNTYYADSVKGRFTISTDSAKNTLYLQMNSLKPEDTAVYYCAADSDLSTVVVGPHDYWGQGTQVTVSS

SEQ ID NO: 394 - protein, 123 aa, synthetic construct
EVQLVESGGGLVQPGGSLRLSCAASGFTFDDIAMTWVRQAPGKGLEWVSSIYSYGPNTYYADSVKGRFTISTDSAKNTLYLQMNSLKPEDTAVYYCAADSDLRTVGVGPHDYWGQGTQVTVSS

SEQ ID NO: 395 - protein, 123 aa, synthetic construct
EVQLVESGGGLVQPGGSLRLSCAASGFTFDDIAMTWVRQAPGKGLEWVSSIYSYGPNTYYADSVKGRFTISTDSAKNTLYLQMNSLKPEDTAVYYCAAESDLRTVVVGPHDYWGQGTQVTVSS

SEQ ID NO: 396 - protein, 123 aa, synthetic construct
EVQLVESGGGLVQPGGSLRLSCAASGFTFDDIAMTWVRQAPGKGLEWVSSIYSYGPNTYYADSVKGRFTISTDSAKNTLYLQMNSLKPEDTAVYYCAADSDLRTGVVGPHDYWGQGTQVTVSS

SEQ ID NO: 397 - protein, 123 aa, synthetic construct
EVQLVESGGGLVQPGGSLRLSCAASGFTFDDIAMTWVRQAPGKGLEWVSSIYSYGPNTYYADSVKGRFTISTDSAKNTLYLQMNSLKPEDTAVYYCAADSDLRTVVVGPHDSWGQGTQVTVSS

SEQ ID NO: 398 - protein, 123 aa, synthetic construct
EVQLVESGGGLVQPGGSLRLSCAASGFTFDDIAMTWVRQAPGKGLEWVSSIYSYGPNTYYADSVKGRFTISTDSAKNTLYLQMNSLKPEDTAVYYCVADSDLSTVVDGPHDYWGQGTQVTVSS

SEQ ID NO: 399 - protein, 123 aa, synthetic construct
EVQLVESGGGLVQPGGSLRLSCAASGFTLDDYAMSWVRQAPGKGLEWVSTIFSYSSNTYYADSVKGRFTISTDNAKNTLYLQMNSLKPEDTAVYYCAADSDLSTVVVGPHDYWGQGTQVTVSS

SEQ ID NO: 400 - protein, 123 aa, synthetic construct
EVQLVESGGGLVQPGGSLRLSCAASGFTLDDYAMSWVRQAPGKGLEWVSTIFSYSSNTYYADSVKGRFTISTDSAKNTLYLQMNSLKPEDTAVYYCAADSDLSTVVVGPHDYWGQGTQVTVSS

SEQ ID NO: 401 - protein, 125 aa, synthetic construct
EVQLVESGGGLAQPGGSLRLSCQASGFTFSGYAMSWARQAPGKGLEWVSGIYSDGSETYYADSVKGRFTISRDNAKNTVYLQMSSLKSEDTATYYCAKDAGSWGRGPFGFDYDYWGQGTQVTVSS

SEQ ID NO: 402 - protein, 125 aa, synthetic construct
EVQLVESGGGLAQPGGSLRLSCAASGFTFSSYAMSWARQAPGKGLEWVSGISSDGSDTYYADSVKGRFTISRDNAKNTVYLQMNSLKPEDTALYVCAKDAGSWGTGPFGYEYDYWGQGTQVTVSS

SEQ ID NO: 403 - protein, 125 aa, synthetic construct
EVQLVESGGGLVQPGGSLRLSCAASGFTFSSYAMSWARQAPGKGLEWVSGISSDGSDTYYADSVKGRFTISRDNAKNTVYLQMNSLKPEDTALYVCAKDAGSWGTGPFGYEYDYWGQGTQVTVSS

SEQ ID NO: 404 - protein, 125 aa, synthetic construct
EVQLVESGGGLAQPGGSLRLSCQASGFTFSGYAMSWARQAPGRGLEWVSGIYSDGSETYYADSVKGRFTISRDNAKNTVYLQMSSLKSEDTATYYCAKDAGSWGRGPFGFDYDYWGQGTQVTVSS

SEQ ID NO: 405 - protein, 125 aa, synthetic construct
EVQLVESGGGLVQPGGSLRLSCQASGFTFSGYAMSWARQAPGKGLEWVSGIYSDGSETYYADSVKGRFTISRDNAKNTVYLQMSSLKSEDTATYYCAKDAGSWGRGPFGFDYDYWGQGTQVTVSS

SEQ ID NO: 406 - protein, 125 aa, synthetic construct
EVQLVESGGGLAQPGGSLRLSCQASGFTFSGYAMGWARQAPGKGLEWVSGIYSDGSETYYADSVKGRFTISRDNAKNTVYLQMSSLKSEDTATYYCAKDAGSWGRGPFGFDYDYWGQGTQVTVSS

SEQ ID NO: 407 - protein, 125 aa, synthetic construct
EVQLVESGGGLAQPGGSLRLSCQASGFTFSGYAMSWARQAPGKGLEWVSGIYSDGSETYYADSVKGRFTISRDNAKNTVYLQMSGLKSEDTATYYCAKDAGSWGRGPFGFDYDYWGQGTQVTVSS

SEQ ID NO: 408 - protein, 125 aa, synthetic construct
EVQLVESGGGLVQPGGSLRLSCAASGFTFSRYAMSWARQAPGKGLEWVSGISDDGSDTYYADSVKGRFTISRDNAKNTVYLQMNSLKPEDTALYYCAKDAGSWGTGPFGYEYDYWGQGTQVTVSS

SEQ ID NO: 409 - protein, 125 aa, synthetic construct
EVQLVESGGGLAQPGGSLRLSCAASGFTFSSYAMSWARQAPGKGLEWVSGISSDGSDTYYADSVKGRFTISRDNAKNTVYLQMNSLKPEDTALYVCANDAGGWGTGPFGYEYDYWGQGTQVTVSS

SEQ ID NO: 410 - protein, 125 aa, synthetic construct
EVQLVESGGGLAQPGGSLRLSCAASGFTFSSYAMSWARQAPGKGLEWVSGISSDGSDTYYADSVKGRFTISRDNAKNTVYLQMNSLKPEDTALYVCAKAAGGWGTGPFGYEYDYWGQGTQVTVSS

SEQ ID NO: 411 - protein, 118 aa, synthetic construct
EVQLVESGGGLVQAGGSLRLSCAASGRTFSDYGMGWFRQAPGKEQEFVATINWSNGRTYYADSVKGRFTISRDNAKNTGYLEMSSLKVEDTAVYYCATTPSGKAYSYWGQGTQVTVSS

SEQ ID NO: 412 - protein, 118 aa, synthetic construct
EVQLVESGGGLVQAGGSLRLSCAASGRTFSDYGMGWFRQAPGKDSEFVAAINWSNGRTNYADSVKGRFTISRDNAKNTGYLEMNSLKVEDTAVYYCATTPSGKAYSYWGQGTQVTVSS

SEQ ID NO: 413 - protein, 118 aa, synthetic construct
EVQLVESGGGLVQAGGSLRLSCAASGRTFSDYGMGWFRQAPGKDSEFVATINWSNGRTSYADSVKGRFTISRDNAKNTGYLEMNSLKVEDTAVYYCAGTPSGKAYTNWGQGTQVTVSS

SEQ ID NO: 414 - protein, 118 aa, synthetic construct
EVQLVESGGGLVQAGGSLRLSCAASGRTFSDYGMGWFRQAPGKDSEFVAAINWSNGRTNYADSVKGRFTISRDNAKNTGYLEMNSLKVEDTAVYYCAVTPSGKAYSYWGQGTQVTVSS

SEQ ID NO: 415 - protein, 118 aa, synthetic construct
EVQLVESGGGLVQAGGSLRLSCAASGRTFSDYGMGWFRQAPGKEREFVATINWSNGRTYYADSVKGRFTISRDNAKNTGYLEMNSLKVEDTAVYFCAATPSGKAFTYWGQGTQVTVSS

SEQ ID NO: 416 - protein, 118 aa, synthetic construct
EVQLVESGGGLVQAGGSLRLSCAASGRTFSDYGMGWFRQAPGKEREFVATINWSNGRTTYADSVKGRFTISRDNAENTGYLEMNSLKVEDTALYYCAATPSGKAFTYWGQGTQVTVSS

SEQ ID NO: 417 - protein, 118 aa, synthetic construct
EVQLVESGGGLVQAGGSLRLSCAASGRTFSDYGMGWFRQAPGKEQEFVATINWSNGRTYYADSVKGRFTISRDNAKNTGYLEMNSLKVEDTAVYYCAATPTGKAYSYWGQGTQVTVSS

SEQ ID NO: 418 - protein, 118 aa, synthetic construct
EVQLVESGGGLVQAGGSLRLSCAASGRTFSDYGMGWFRQAPGKEREFVATINWSNGRTTYADSVKGRFTISRDNAENTGYLEMNSLKVEDTALYYCAATPSGKAYTYWGQGTQVTVSS

SEQ ID NO: 419 - protein, 118 aa, synthetic construct
EVQLVESGGGLVQAGGSLRLSCAASGRTFSDYGMGWFRQAPGKEREFVATINWSNGRTTYADSVKGRFTISRDNAENTGYLEMNSLKVEDTALYYCAATPTGKAYTYWGQGTQVTVSS

SEQ ID NO: 420 - protein, 118 aa, synthetic construct
EVQLVESGGGLVQAGGSLRLSCAASGRTFSDYGMGWFRQAPGKEREFVATINWSNGRTTYADSVKGRFTISRDNAENTGYLEMNSLKVEDTALYYCAATPAGKAYTYWGQGTQVTVSS

SEQ ID NO: 421 - protein, 118 aa, synthetic construct
EVQLVESGGGLVQAGGSLRLSCAASGRTFSDYGMGWFRQAPGKEREFVATINWSNGRTTYADSVKGRFTISRDTAENTGYLEMNSLKVEDTALYYCAATPAGKAYTYWGQGTQVTVSS

SEQ ID NO: 422 - protein, 118 aa, synthetic construct
EVQLVESGGGLVQAGGSLRLSCAASGRTFSDYGMGWFRQAPGKEHEFVASINWSNGRTSYADSAKGRFTISRDNAKNTGYLEMNSLKVEDTAVYYCAGTLSGKAYTYWGQGTQVTVSS

SEQ ID NO: 423 - protein, 118 aa, synthetic construct
EVQLVESGGGLVQAGGSLRLSCAASGRTFSDYGMGWFRQAPGKEREFVATINWSNGRTTYADSVKGRFTISRDNAENTGYLEMNSLKVEDTALYYCAATPSGKAYSNWGQGTQVTVSS

SEQ ID NO: 424 - protein, 118 aa, synthetic construct
EVQLVESGGGLVQAGGSLRLSCAASGRTFSDYGMGWFRQAPGKEREFVATINWSNGRTTYADSVKGRFTISRDNAENTGYLEMNSLKVEDTALYYCAATPSGRAYTYWGQGTQVTVSS

SEQ ID NO: 425 - protein, 118 aa, synthetic construct
EVQLVESGGGLVQAGGSLRLSCAASGRTFSDYGMGWFRQAPGKEREFVATINWSNGRTTYADSVKGRFTISRDNAENTGYLEMNSLKVEDTALYYCAANPSGKAYTYWGQGTQVTVSS

SEQ ID NO: 426 - protein, 118 aa, synthetic construct
EVQLVESGGGLVQAGGSLRLSCAASGRTFSDYGMGWFRQAPGKEREFVATINWSNGRTTYADSVKGRFTISRDNAENTGYLEMNSLKVEDTALYYCAATPSAKAYTYWGQGTQVTVSS

SEQ ID NO: 427 - protein, 118 aa, synthetic construct
EVQLVESGGGLVQAGGSLRLSCAASGRTFSDYGMGWFRQAPGKEREFVATINWSNGRTTYADSVKGRFTISRDNAENTGYLEMNSLKVEDTALYYCAATPSGKADTYWGQGTQVTVSS

SEQ ID NO: 428 - protein, 118 aa, synthetic construct
EVQLVESGGGLVQAGGSLRLSCAASGRTFSDYGMGWFRQAPGKEREFVATINWSNGRTTYADSVKGRFTISRDNAENTGYLEMNSLKVEDTALYYCAATPSGKANTYWGQGTQVTVSS

SEQ ID NO: 429 - protein, 118 aa, synthetic construct
EVQLVESGGGLVQAGGSLRLSCAASGRTFSDYGMGWFRQAPGKEREFVATINWSNGRTTYADSVKGRFTISRDNAENTGYLEMNSLKVEDTALYYCAATPSGRAFTYWGQGTQVTVSS

SEQ ID NO: 430 - protein, 118 aa, synthetic construct
EVQLVESGGGLVQAGGSLRLSCAASGRTFSDYGMGWFRQAPGKEREFVATINWSNGRTTYADSVKGRFTISRDNAENTGYLEMNSLKVEDTALYYCAATTSGKAYTYWGQGTQVTVSS

SEQ ID NO: 431 - protein, 118 aa, synthetic construct
EVQLVESGGGLVQAGGSLRLSCAASGRTFSDYGMGWFRQAPGKEREFVATINWSNGRTTYADSVKGRFTISRDNAENTGYLEMNSLKVEDTALYYCAATPSGQAYTYWGQGTQVTVSS

SEQ ID NO: 432 - protein, 118 aa, synthetic construct
EVQLVESGGGLVQAGGSLRLSCAASGRTFSDYGMGWFRQAPGKEREFVATINWSNGRTTYADSVKGRFTISRDTAENTGYLEMNSLKVEDTALYYCAATPSGQAYTYWGQGTQVTVSS

SEQ ID NO: 433 - protein, 118 aa, synthetic construct
EVQLVESGGGLVQAGGSLRLSCAASGRTFSDYGMGWFRQAPGKEREFVATINWSNGRTTYADSVKGRFTISRDNAENTGYLEMNSLKVEDTALYYCAAPPSGKAYTYWGQGTQVTVSS

SEQ ID NO: 434 - protein, 118 aa, synthetic construct
EVQLVESGGGLVQAGGSLRLSCAASGRTFSDYGMGWFRQAPGKEREFVATINWSNGRTTYADSVKGRFTISRDNAENTGYLEMNSLKVEDTALYYCAATPSGKEYTYWGQGTQVTVSS

SEQ ID NO: 435 - protein, 118 aa, synthetic construct
EVQLVESGGGLVQAGGSLRLSCAASGRTFSDYGMGWFRQAPGKEREFVATINWSNGRTTYADSVKGRFTISRDNAENTVYLEMNSLKVEDTALYYCAATPSGKEYTYWGQGTQVTVSS

SEQ ID NO: 436 - protein, 118 aa, synthetic construct
EVQLVESGGGLVQAGGSLRLSCAASGRTFSDYGMGWFRQAPGKEREFVATINWSNGRTTYADSVKGRFTISRDNAENTGYLEMNSLKVEDTALYYCAATPSGTAYTYWGQGTQVTVSS

SEQ ID NO: 437 - protein, 118 aa, synthetic construct
EVQLVESGGGLVQAGGSLRLSCAASGRTFSDYGMGWFRQAPGKEREFVATINWSNGRTTYADSVKGRFTISRDNAENTGYLEMNSLKVEDTALYYCAAAPSGKAYTYWGQGTQVTVSS

SEQ ID NO: 438 - protein, 118 aa, synthetic construct
EVQLVESGGGLVQAGGSLRLSCAASGRTFSDYGMGWFRRAPGKEQEFVATINWSNGRTYYADSVKGRFTISRDNAKNTGYLEMNSLKVEDTAVYYCAATPSGKAYSHWGQGTQVTVSS

SEQ ID NO: 439 - protein, 118 aa, synthetic construct
EVQLVESGGGLVQAGGSLRLSCAASGRTFSDYGMGWFRQAPGKEQEFVATINWSNGRTYYADSVKGRFTISRDNAKNAGYLEMNSLKVEDTAVYYCAATPSGKAYSNWGQGTQVTVSS

SEQ ID NO: 440 - protein, 118 aa, synthetic construct
EVQLVESGGGLVQAGGSLRLSCAASGRTFSDYGMGWFRQAPGKDSEFVAAINWSNGRTNYADSVKGRFTISRDNAKNTGYLEMNSLKVEDTAVYYCAATPFGKAYSYWGQGTQVTVSS

SEQ ID NO: 441 - protein, 118 aa, synthetic construct
EVQLVESGGGLVQAGGSLRLSCAASGRTFSDYGMGWFRQAPGKDSEFVAAINWSNGRTNYADSVKGRFTISRDNAKNTGYLEMNSLKVEDTAVYYCAAPPSGKAYSYWGQGTQVTVSS

SEQ ID NO: 442 - protein, 118 aa, synthetic construct
EVQLVESGGGLVQAGGSLRLSCAASGRTFSDYGMGWFRQAPGKEHEFVASINWSNGRTSYADSAKGRFTISRDNAKNTGYLEMNSLKVEDTAVYYCAGTPSGKAYSYWGQGTQVTVSS

SEQ ID NO: 443 - protein, 118 aa, synthetic construct
EVQLVESGGGLVQAGGSLRLSCAASGRTFSDYGMGWFRQAPGKEREFVATINWSNGRTTYADSVKGRFTISRDNAENTGYLEMNSLKVEDTALYYCAASPSGKAYTYWGQGTQVTVSS

SEQ ID NO: 444 - protein, 118 aa, synthetic construct
EVQLVESGGGLVQAGGSLRLSCAASGRTFSDYGMGWFRQAPGKEREFVATINWSNGRTTYADSVKGRFTISRDNAENTGYLEMNSLKVEDTALYYCAATHSGKAYTYWGQGTQVTVSS

SEQ ID NO: 445 - protein, 118 aa, synthetic construct
EVQLVESGGGLVQAGGSLRLSCAASGRTFSDYGMGWFRQAPGKEREFVATINWSNGRTTYADSVKGRFTISRDNAENTGYLEMNSLKVEDTALYYCAATPPGKAYTYWGQGTQVTVSS

SEQ ID NO: 446 - protein, 118 aa, synthetic construct
EVQLVESGGGLVQAGGSLRLSCAASGRTFSDYGMGWFRQAPGKEREFVATINWSNGRTTYADSVKGRFTISRDNAENTGYLEMNSLKVEDTALYYCAATPSGKAHTYWGQGTQVTVSS

SEQ ID NO: 447 - protein, 118 aa, synthetic construct
EVQLVESGGGLVQAGGSLRLSCAASGRTFSDYGMGWFRQAPGKEREFVATINWSNGRTTYADSVKGRFTISRDNAENTGYLEMNSLKVEDTALYYCAATPSGKSYTYWGQGTQVTVSS

SEQ ID NO: 448 - protein, 118 aa, synthetic construct
EVQLVESGGGLVQAGGSLRLSCAASGRTFSDYGMGWFRQAPGKEREFVATINWSNGRTTYADSVKGRFTISRDNAENTGYLEMNSLKVEDTALYYCAATPSGKVYTYWGQGTQVTVSS

SEQ ID NO: 449 - protein, 118 aa, synthetic construct
EVQLVESGGGLVQAGGSLRLSCAASGRTFSDYGMGWFRQAPGKEREFVATINWSNGRTTYADSVKGRFTISRDNAENTGYLEMNSLKVEDTALYYCAATPSGMAYTYWGQGTQVTVSS

SEQ ID NO: 450 - protein, 118 aa, synthetic construct
EVQLVESGGGLVQAGGSLRLSCAASGRTFSDYGMGWFRQAPGKEREFVATINWSNGRTTYADSVKGRFTISRDNAENTGYLEMNSLKVEDTALYYCAATPSGNAYTYWGQGTQVTVSS

SEQ ID NO: 451 - protein, 118 aa, synthetic construct
EVQLVESGGGLVQAGGSLRLSCAASGRTFSDYGMGWFRQAPGKEREFVATINWSNGRTTYADSVKGRFTISRDNAENTGYLEMNSLKVEDTALYYCAATPSRKAYTYWGQGTQVTVSS

SEQ ID NO: 452 - protein, 118 aa, synthetic construct
EVQLVESGGGLVQAGGSLRLSCAASGRTFSDYGMGWFRQAPGKEREFVATINWSNGRTTYADSVKGRFTISRDNAENTGYLEMNSLKVEDTALYYCAATPSVKAYTYWGQGTQVTVSS

SEQ ID NO: 453 - protein, 118 aa, synthetic construct
EVQLVESGGGLVQAGGSLRLSCAASGRTFSDYGMGWFRQAPGKEREFVATINWSNGRTTYADSVKGRFTISRDNAENTGYLEMNSLKVEDTALYYCAATPYGKAYTYWGQGTQVTVSS

SEQ ID NO: 454 - protein, 118 aa, synthetic construct
EVQLVESGGGLVQPGGSLRLSCAASGRTFSDYGMGWFRQAPGKEREFVATINWSNGRTTYADSVKGRFTISRDNAENTGYLEMNSLKVEDTALYYCAATPSGKAYTYWGQGTQVTVSS

SEQ ID NO: 455 - protein, 118 aa, synthetic construct
EVQLVESGGGLVQAGGSLRLSCAASGRTFSDYGMGWFRQAPGKEREFVATINWSNGRTTYADPVKGRFTISRDNAENTGYLEMNSLKVEDTALYYCAATPSGRAYTYWGQGTQVTVSS

SEQ ID NO: 456 - protein, 118 aa, synthetic construct
EVQLVESGGGLVQAGGSLRLSCAPSGRTFSDYGMGWFRQAPGKEREFVATINWSNGRTAYADSVKGRFTISRDSAKNTGYLEMNSLKVEDTAVYVCAATPSGRAYTYWGQGTQVTVSS

SEQ ID NO: 457 - protein, 118 aa, synthetic construct
EVQLVESGGGLVQAGGSLRLSCAASGRTFSDYGMGWFRQAPGKEHEFVASINWSNGRTSYADSAKGRFTISRDNAKNTGYLEMNSLKVEDTAVYYCAAPPSGKAYTYWGQGTQVTVSS

SEQ ID NO: 458 - protein, 118 aa, synthetic construct
EVQLVESGGGLVQAGGSLRLSCAASGRTFSDYGMGWFRQAPGKEREFVATINWSNGRTTYADSVKGRFTISRDNAENPGYLEMNSLKVEDTALYYCAATPSGTAYTYWGQGTQVTVSS

SEQ ID NO: 459 - protein, 118 aa, synthetic construct
EVQLVESGGGLVQAGGSLRLSCAASGRTFSDYGMGWFRQAPGKEREFVATINWSNGRTTYADSVKGRFTISRDNAENTGYLEMNSLKVEDTALYYCAATLSGKAYTYWGQGTQVTVSS

SEQ ID NO: 460 - protein, 118 aa, synthetic construct
EVQLVESGGGLVQAGGSLRLSCAASGRTFSDYGMGWFRQAPGKEREFVATINWSNGRTTYADSVKGRFTISRDNAENTGYLEMNSLKVEDTALYYCAATPSGEAYTYWGQGTQVTVSS

SEQ ID NO: 461 - protein, 118 aa, synthetic construct
EVQLVESGGGLVQAGGSLRLSCAASGRTFSDYGMGWFRQAPGKESEFVATIQWSNGRTSYADSVKGRFTISRDNAKNTGYLEMNSLKVEDTAVYYCAATPFGKAYTYWGQGTQVTVSS

SEQ ID NO: 462 - protein, 118 aa, synthetic construct
EVQLVESGGGLVQAGGSLRLSCVASGRTFSSYYIGWFRQAPGKEGEFVAGISWSGKSTSYTDSVKGRFTISRDNAENTGYLEMNSLKVEDTALYYCAATPSGKAYTYWGQGTQVTVSS

SEQ ID NO: 463 - protein, 118 aa, synthetic construct
EVQLVESGGGLVQAGGSLRLSCAASGRTFSDYGMGWFRQAPGKDSEFVAAINWSNGRTNYADSVKGRFTISRDNAKNTGYLEMNSLKVEDTAVYYCAATPSGQAYSYWGQGTQVTVSS

SEQ ID NO: 464 - protein, 118 aa, synthetic construct
EVQLVESGGGLVQAGGSLRLSCAASGRTFSDYGMGWFRQAPGKDSEFVAAINWSNGRTNYADSVKGRFTISRDNAKNTGYLEMNSLKVEDTAVYYCAATPSGEAYSYWGQGTQVTVSS

SEQ ID NO: 465 - protein, 118 aa, synthetic construct
EVQLVESGGGLVQAGGSLRLSCAASGRTFSDYGMGWFRQAPGKDSEFVAAINWSNGRTNYADSVKGRFTISRDNAKNTGYLEMNSLKVEDTAVYYCTATPSGKAYSYWGQGTQVTVSS

SEQ ID NO: 466 - protein, 118 aa, synthetic construct
EVQLVESGGGLVQAGGSLRLSCAASGRTFSDYGMGWFRQAPGKEHEFVASINWSNGRTSYADSAKGRFTISRDNAKNTGYLEMNSLKVEDTAVYYCAATPSGKAYTYWGQGTQVTVSS

SEQ ID NO: 467 - protein, 118 aa, synthetic construct
EVQLVESGGGLVQAGGSLRLSCAASGRTFSDYGMGWFRQAPGKEREFVATINWSNGRTTYADSVKGRFTISRDNAENTGYLEMNSLKVEDTALYYCAAIPSGKAYTYWGQGTQVTVSS

SEQ ID NO: 468 - protein, 118 aa, synthetic construct
EVQLVESGGGLVQAGGSLRLSCAASGRTFSDYGMGWFRQAPGKEREFVATINWSNGRTTYADSVKGRFTISRDNAENTGYLEMNSLKVEDTALYYCAATASGKAYTYWGQGTQVTVSS

SEQ ID NO: 469 - protein, 118 aa, synthetic construct
EVQLVESGGGLVQAGGSLRLSCAASGRTFSDYGMGWFRQAPGKEREFVATINWSNGRTTYADSVKGRFTISRDNAENTGYLEMNSLKVEDTALYYCAATPSGKGYTYWGQGTQVTVSS

SEQ ID NO: 470 - protein, 118 aa, synthetic construct
EVQLVESGGGLVQAGGSLRLSCAASGRTFSDYGMGWFRQAPGKEREFVATINWSNGRTTYADSVKGRFTISRDNAENTGYLEMNSLKVEDTALYYCAATPSGKPYTYWGQGTQVTVSS

SEQ ID NO: 471 - protein, 118 aa, synthetic construct
EVQLVESGGGLVQAGGSLRLSCAASGRTFSDYGMGWFRQAPGKEREFVATINWSNGRTTYADSVKGRFTISRDNAENTGYLEMNSLKVEDTALYYCAATRSGKAYTYWGQGTQVTVSS

SEQ ID NO: 472 - protein, 118 aa, synthetic construct
EVQLVESGGGLVQAGGSLRLSCAASGRTFSDYGMGWFRQAPGKEREFVATINWSNGRTTYADSVKGRFTISRDNAENTGYLEMNSLKVEDTALYYCAATSSGKAYTYWGQGTQVTVSS

SEQ ID NO: 473 - protein, 118 aa, synthetic construct
EVQLVESGGGLVQAGGSLRLSCAASGRTFSDYGMGWFRQAPGKEREFVATINWSNGRTTYADSVKGRFTISRDNAENTGYLEMNSLKVEDTALYDCAATPSGQAYTYWGQGTQVTVSS

SEQ ID NO: 474 - protein, 118 aa, synthetic construct
EVQLVESGGGLVQAGGSLRLSCAASGRTFSDYGMGWFRQAPGKEREFVATINWSNGRTTYADSVKGRFTISRDTAENTGYLEMNSLKVEDTALYYCAAPPSGKAYTYWGQGTQVTVSS

SEQ ID NO: 475 - protein, 118 aa, synthetic construct
EVQLVESGGGLVQAGGSLRLSCAASGRTFSDYGMGWFRQAPGKEREFVATINWSNGRTTYADSVKGRFTISRDNAENTGYLEMNSLKVEDTALYYCAATPSGKTYTYWGQGTQVTVSS

SEQ ID NO: 476 - protein, 118 aa, synthetic construct
EVQLVESGGGLVQAGGSLRLSCAASGRTFSDYGMGWFRQAPGKEREFVATINWSNGRTTYADSVKGRFTISRDNAENTGYLEMNSLKVEDTALYYCAATPFGKAYTYWGQGTQVTVSS

SEQ ID NO: 477 - protein, 118 aa, synthetic construct
EVQLVESGGGLVQPGGSLRLSCAASGRTFSDYGMGWFRQAPGKEREFVATINWSNGRTTYADSVKGRFTISRDNAENTGYLEMNSLKVEDTALYYCAATPSGKEYTYWGQGTQVTVSS

SEQ ID NO: 478 - protein, 118 aa, synthetic construct
EVQLVESGGGLVQAGGSLRLSCAASGRTFSDYGMGWFRQAPGKEREFVATINWSTGRTTYADSVKGRFTISRDNAENTGYLEMNSLKVEDTALYYCAATPSGQAYTYWGQGTQVTVSS

SEQ ID NO: 479 - protein, 118 aa, synthetic construct
EVQLVESGGGLVQAGGSLRLSCAASGRTFSDYGMGWFRQAPGKEREFVATINWSNGRTTYADSVKGRFTTSRDNAENTGYLEMNSLKVEDTALYYCAATPTGKAYTYWGQGTQVTVSS

SEQ ID NO: 480 - protein, 118 aa, synthetic construct
EVQLVESGGGLVQAGGSLRLSCAASGRTFSDYGMGWFRQAPGKEREFVATINWSNGRTTYADSVKGRFTISRDNAENTGYLEMNSLRVEDTALYYCAATPTGKAYTYWGQGTQVTVSS

SEQ ID NO: 481 - protein, 118 aa, synthetic construct
EVQLVESGGGLVQAGGSLRLSCAASGRTFSDYGMGWFRQAPGKEREFVATINWSNGRTTYADSVKGRFTISRDTAENTGYLEMNSLKVEDTALYYCAATPSGTAYTYWGQGTQVTVSS

SEQ ID NO: 482 - protein, 118 aa, synthetic construct
EVQLVESGGGLVQAGGSLRLSCAASGRTFSDYGMGWFRQAPGKDSEFVATINWSNGRTSYADSVKGRFTISRDNAKNTGYLEMNSLKVEDTAVYYCAGTPSGKAYTYWGQGTQVTVSS

SEQ ID NO: 483 - protein, 118 aa, synthetic construct
EVQLVESGGGLVQAGGSLRLSCAASGRTFSDYGMGWFRQAPGKEHEFVASINWSNGRTSYADSAKGRFTISRDNAKNTGYLEMNSLKVEDTAVYYCAGTPSGEAYTYWGQGTQVTVSS

SEQ ID NO: 484 - protein, 118 aa, synthetic construct
EVQLVESGGGLVQAGGSLRLSCAASGRTFSDYGMGWFRQAPGKEHEFVASINWSNGRTSYADSAKGRFTISRDNAKNTGYLEMNSLKVEDTAVYYCAGTPSGKTYTYWGQGTQVTVSS

SEQ ID NO: 485 - protein, 118 aa, synthetic construct
EVQLVESGGGLVQAGGSLRLSCAASGRTFSDYGMGWFRQAPGKEHEFVASINWSNGRTSYADSAKGRFTISRDNAKNTGYLEMNSLKVEDTAVYYCAGTPSGKAYAYWGQGTQVTVSS

SEQ ID NO: 486 - protein, 118 aa, synthetic construct
EVQLVESGGGLVQAGGSLRLSCAASGRTFSDYGMGWFRQAPGKEHEFVASINWSNGRTSYADSAKGRFTISRDNAKNTGYLEMNSLKVEDTAVYYCAGTPSGKAYTYWGQGTQVTVSS

SEQ ID NO: 487 - protein, 118 aa, synthetic construct
EVQLVESGGGLVQAGGSLRLSCAASGRTFSDYGMGWFRQAPGKEHEFVASINWSNGRTSYADSAKGRFTISRDNAKNTGYLEMNSLKVEDTAVYYCAGTPSGKAYTSWGQGTQVTVSS

SEQ ID NO: 488 - protein, 118 aa, synthetic construct
EVQLVESGGGLVETGGSLRLSCAASGRTFGNYTMGWFRQAPGREREFLASIRWTGGSTSYADSVKGRFTISRDNAKKAVYLQMNSLKPEDTAVYSCVATPSGKAYSYWGQGTQVTVSS

SEQ ID NO: 489 - protein, 129 aa, synthetic construct
EVQLVESGGGLVQPGGSLRLSCAASGFTLDYYAIGWFRQAPGKEREGVSCISTSDGSTYYADSVKGRFTISRDNAKNTVYLQMNSLKPEDTGVYYCATPGPYMYCAPYGSSWSRGYDYWGQGTQVTVSS

SEQ ID NO: 490 - protein, 129 aa, synthetic construct
EVQLVESGGGLVQPGGSLRLSCAVSGFTLDYYAIGWFRQAPGKEREGVSCINVGDGSTGYADSVKGRFTISRDNAKNTVYLQMNSLKPEDTAVYYCATPGPYSYCAPYGSSWSRGYDYWGQGTQVTVSS

SEQ ID NO: 491 - protein, 118 aa, synthetic construct
EVQLVESGGGLAQPGGSLRLSCAASGFNFSMYSMSWVRQAPGKGPEWVSAIDTGGSTRYADSVKGRFTISRDNAKNTLYLQMDSLKPEDTALYYCARVRGTPYEYGYRGQGTQVTVSS

SEQ ID NO: 492 - protein, 118 aa, synthetic construct
EVQLVESGGGLVQPGGSLRLSCAASGFNFSMYSMSWVRQAPGKGPEWVSAIDTGGSTRYADSVKGRFTISRDNAKNTLYLQMDSLKPEDTALYYCARVRGTPYDYGYRGQGTQVTVSS

SEQ ID NO: 493 - protein, 118 aa, synthetic construct
EVQLVESGGGLVQPGGSLRLSCAASGFNFSMYSMSWVRQAPGKGPEWVSAIDTGGSTRYADSVKGRFTISRDNAKNTLYLQMDSLKPEDTALYYCARVRGTTYEYGYRGQGTQVTVSS

SEQ ID NO: 494 - protein, 118 aa, synthetic construct
EVQLVESGGGLVQPGGSLRLSCAASGFNFSMYSMSWVRQAPGKGPEWVSAIDTGGSTRYADSVKGRFTISRDNAKNTLYLQMDSLKPEDTALYYCARVRGTQYEYGYRGQGTQVTVSS

SEQ ID NO: 495 - protein, 118 aa, synthetic construct
EVQLVESGGGLVQPGGSLRLSCAASGFNFSMYSMSWVRQAPGKGPEWVSAIDTGGSTRYADSVKGRFTISRDNAKNTLYLQMDSLKPEDTALYYCARVRGTPSEYGYRGQGTQVTVSS

SEQ ID NO: 496 - protein, 118 aa, synthetic construct
EVQLVESGGGLVQPGGSLRLSCAASGFNFSMYSMSWVRQAPGKGPEWVSAIDTGGSTRYADSVKGRFTISRDNAKNTLYLQMDSLKPEDTALYYCARVQGTPYEYGYRGQGTQVTVSS

SEQ ID NO: 497 - protein, 118 aa, synthetic construct
EVQLVESGGGLVQPGGSLRLSCAASGFNFSMYSMSWVRQAPGKGPEWVSAIDTGGSTRYADSVKGRFTISRDNAKNTLYLQMDSLKPEDTALYYCARVRVTPYEYGYRGQGTQVTVSS

SEQ ID NO: 498 - protein, 118 aa, synthetic construct
EVQLVESGGGLVQPGGSLRLSCAASGFNFSMYSMSWVRQAPGKGPEWVSAIDTGGSTRYADSVKGRFTISRDNAKNTLYLQMDSLKPEDTALYYCARVRGTPYVYGYRGQGTQVTVSS

SEQ ID NO: 499 - protein, 118 aa, synthetic construct
EVQLVESGGGLVQPGGSLRLSCAASGFNFSMYSMSWVRQAPGKGPEWVSAIDTGGSTRYADSVKGRFTISRDNAKNTLYLQMDSLKPEDTALYYCARVLGTPYEYGYRGQGTQVTVSS

SEQ ID NO: 500 - protein, 118 aa, synthetic construct
EVQLVESGGGLVQPGGSLRLSCAASGFNFSMYSMSWVRQAPGKGPEWVSAIDTGGSTRYADSVKGRFTISRDNAKNTLYLQVDSLKPEDTALYYCARVRGTPYEYGYRGQGTQVTVSS

SEQ ID NO: 501 - protein, 118 aa, synthetic construct
EVQLVESGGGLVQPGGSLRLSCAASGFNFSMYSMSWVRQAPGKGPEWVSAIDTGGSTRYADSVRGRFTISRDNAKNTLYLQMDSLKPEDTALYYCARVRGTPYEYGYRGQGTQVTVSS

SEQ ID NO: 502 - protein, 118 aa, synthetic construct
EVQLVESGGGLVQPGGSLRLSCAASGFNFSMYSMSWVRQAPGKGPEWVSAIDTGGSTRYADSVKGRFTISRDNAKNTLYLQMDSLKPEDTALYYCARVRDTPYEYGYRGQGTQVTVSS

SEQ ID NO: 503 - protein, 118 aa, synthetic construct
EVQLVESGGGLVQPGGSLRLSCAASGFNFSMYSMSWVRQAPGKGPEWVSAIDTGGSTRYADSVKGRFTISRDNAKNTLYLQMDSLKPEDTALYYCARVRGTPFEYGYRGQGTQVTVSS

SEQ ID NO: 504 - protein, 118 aa, synthetic construct
EVQLVESGGGLVQPGGSLRLSCAASGFNFSMYSMSWVRQAPGKGPEWVSAIDTGGSTRYADSVKGRFTISRDNAKNTLYLQMDSLKPEDTALYYCARVWGTPYEYGYRGQGTQVTVSS

SEQ ID NO: 505 - protein, 118 aa, synthetic construct
EVQLVESGGGLVQPGGSLRLSCAASGFNFSMYSMSWVRQAPGKGPEWVSAIDTGGSTRYADSVKGRFTISRDNAKNTLYLQMDSLKPEDTALYYCARVRGKPYEYGYRGQGTQVTVSS

SEQ ID NO: 506 - protein, 118 aa, synthetic construct
EVQLVESGGGLVQPGGSLRLSCAASGFNFSMYSMSWVRQAPGKGPEWVSAIDTGGSTRYADSVRGRFTISRDNAKNTLYLQMDSLKPEDTALYYCARVRGTPYGYGYRGQGTQVTVSS

SEQ ID NO: 507 - protein, 118 aa, synthetic construct
EVQLVESGGGLVQPGGSLRLSCAASGFNFSMYSMSWVRQAPGKGPEWVSAIDTGGSTRYADSVKGRFTISRDNAKNTLYLQMDSLKPEDTALYYCARVRGTPYAYGYRGQGTQVTVSS

SEQ ID NO: 508 - protein, 118 aa, synthetic construct
EVQLVESGGGLVQPGGSLRLSCAASGFNFSMYSMSWVRQAPGKGPEWVSAIDTGGSTRYADSVKGRFTISRDNAKNTLYLQMDSLKPEDTALYYCARVRGTPYGYGYRGQGTQVTVSS

SEQ ID NO: 509 - protein, 118 aa, synthetic construct
EVQLVESGGGLVQPGGSLRLSCAASGFNFSMYSMSWVRQAPGKGPEWVSAIDTGGSTRYADSVKGRFTISRDNAKNTLYLQMDSLKPEDTALYYCARVRGTPHEYGYRGQGTQVTVSS

SEQ ID NO: 510 - protein, 118 aa, synthetic construct
EVQLVESGGGLVQPGGSLRLSCAASGFNFSMYSMSWVRQAPGKGPEWVSAIDTGGSTRYADSVKGRFTISRDNAKNTLYLQMDSLKPEDTALYYCARVRGTPNEYGYRGQGTQVTVSS

SEQ ID NO: 511 - protein, 118 aa, synthetic construct
EVQLVESGGGLAQPGGSLRLSCAASGFNFSMYSMSWVRQAPGKGPEWVSAIDTGGSTRYADSVKGRFTISRDNAKNTLYLQMDSLKPEDTALYYCARVRGTPYDYGYRGQGTQVTVSS

SEQ ID NO: 512 - protein, 118 aa, synthetic construct
EVQLVESGGGLVQPGGSLRLSCAASGFNFSMYSMSWVRQAPGKGPEWVSAIDTGGSTRYADSVKGRFTISRDNDKNTLYLQMDSLKPEDTALYYCARVRGTPYDYGYRGQGTQVTVSS

SEQ ID NO: 513 - protein, 118 aa, synthetic construct
EVQLVESGGGLVQPGGSLRLSCAASGFNFSMYSMSWVRQAPGKGPEWVSAIDTGGSTRYADSVKGRFTISRDNAKNTLYLQMDSLKPEDTALYYCARVRGPPYEYGYRGQGTQVTVSS

SEQ ID NO: 514 - protein, 118 aa, synthetic construct
EVQLVESGGGLVQPGGSLRLSCAASGFNFSMYSMSWVRQAPGKGPEWVSAIDTGGSTRYADSVKGRFTISRDNAKNTLYLQMDSLKPEDTALYYCARVRGTPYKYGYRGQGTQVTVSS

SEQ ID NO: 515 - protein, 119 aa, synthetic construct
EVQLVESGGGLVQPGGSLRLSCAASGFTFDDIAMTWVRQAPGKGLEWVSSIYSYGPNTYYADSVKGRFTISTDSAKNTLYLQMDSLKPEDTALYYCARVRGTPYDYGYRGQGTQVTVSS

SEQ ID NO: 516 - protein, 118 aa, synthetic construct
EVQLVESGGGLVQPGGSLRLSCAASGFNFSMYSMSWVRQAPGKGPEWVSAIDTGGSTRYADSVKGRFTISRDNAKNTLYLQVDSLKPEDTALYYCARVRGTPYDYGYRGQGTQVTVSS

SEQ ID NO: 517 - protein, 118 aa, synthetic construct
EVQLVESGGGLVQPGGSLRLSCAASGFNFSMYSMSWVRQAPGKGPEWVSAIDTGGSTRYADSVKGRFTISRDNAKNTLYLQMDSLKPEDTALYYCARVRGTRYEYGYRGQGTQVTVSS

SEQ ID NO: 518 - protein, 118 aa, synthetic construct
EVQLVESGGGLVQPGGSLRLSCAASGFNFSMYSMSWVRQAPGKGPEWVSAIDTGGSTRYADSVKGRFTISRDNAKNTLYLQMDSLKPEDTALYYCARVRGTPYDYAYWGRGTQVTVSS

SEQ ID NO: 519 - protein, 118 aa, synthetic construct
EVQLVESGGGLVQPGGSLRLSCAASGFNFSMYSMSWVRQAPGKGPEWVSAIDTGGSTRYADSVKGRFTISRDNAKNTLYLQLDSLKPEDTALYYCARVRGTPYDYGYRGQGTQVTVSS

SEQ ID NO: 520 - protein, 118 aa, synthetic construct
EVQLVESGGGLVQPGGSLRLSCAASGFNFSMYSMSWVRQAPGKGPEWVSAIDTGGSTRYADSVKGRFTISRDNAKNTLYLQMDSLKPEDTALYYCARVRGTPDEYGYRGQGTQVTVSS

SEQ ID NO: 521 - protein, 118 aa, synthetic construct
EVQLVESGGGLVQPGGSLRLSCAASGFTFSMYSMSWVRQAPGKGPEWVSAIDTGGSTRYADSVMGRFTISRDNAKNTLYLQMDSLKPEDTGLYYCARVRGSPYDYNYRGQGTQVTVSS

SEQ ID NO: 522 - protein, 118 aa, synthetic construct
EVQLVESGGGLAQPGGSLRLSCAASGFTFSMYSMSWVRQAPGKGPEWVSAIDTRGSTRYADSVKGRFTISRDNAKNTLYLQMDSLKPEDTALYYCARVGGAPYEYNYRGQGTQVTVSS

SEQ ID NO: 523 - protein, 118 aa, synthetic construct
EVQLVESGGGLVQPGGSLRLSCAASGFTFSMYSMSWVRQAPGKGPEWVSAIDTGGSTRYADSVMGRFTISRDNAKNTLYLQMDSLKPEDTGLYYCARVRGSPYEYNYRGQGTQVTVSS

SEQ ID NO: 524 - protein, 118 aa, synthetic construct
EVQLVESGGGLAQPGGSLRLSCAASGFTFSMYSMSWVRQAPGKGPEWVSAIDTGGSTRYADSVMGRFTISRDNAKNTLYLQMDSLKPEDTGLYYCARVRGSPYEYNYRGQGTQVTVSS

SEQ ID NO: 525 - protein, 118 aa, synthetic construct
EVQLVESGGGLVQPGRSLRLSCAASGFTFSMYSMSWVRQAPGKGPEWVSAIDTVDNTRYADSVKGRFTISRDNAKNTLYLQMDSLKPEDTALYYCARVRGAPYEYNYRGQGTQVTVSS

SEQ ID NO: 526 - protein, 118 aa, synthetic construct
EVQLVESGGGLVQPGGSLRLSCAASGFNFSMYSMSWVRQAPGKGPEWVSAIDTGGSTRYADSVKGRFTISRDNAKNTLYLQMDSLKPEDTALYYCARVGGAPYEYNYRGQGTQVTVSS

SEQ ID NO: 527 - protein, 118 aa, synthetic construct
EVQLVESGGGLVQPGGSLRLSCAASGFTFSMYSMSWVRQAPGKGPEWVSAIDTRGSTRYADSVKGRLTISRDNAKNTLYLQMDSLKPEDTALYYCARVGGAPYEYNYRGQGTQVTVSS

SEQ ID NO: 528 - protein, 118 aa, synthetic construct
EVQLVESGGGLVQPGGSLRLSCAASGFNFSMYSMSWVRQAPGKGPEWVSAIDTGGSTRYADSVMGRFTISRDNAKNTLYLQMDSLKPEDTGLYYCARVRGSPYEYNYRGQGTQVTVSS

SEQ ID NO: 529 - protein, 118 aa, synthetic construct
EVQLVESGGGLVQPGGSLRLSCAASGFNFSMYSMSWVRQAPGKGPEWVSAIDTGGSTRYADSVKGRFTISRDNAKNTLYLQMDSLKPEDTALYYCARVRGAPYEYGYRGQGTQVTVSS

SEQ ID NO: 530 - protein, 118 aa, synthetic construct
EVQLVESGGGLVQPGGSLRLSCAASGFNFSMYSMSWVRQAPGKGPEWVSAIDTGGSTRYADSVKGRFTISRDNAKNTLYLQMDSLKPEDTALYYCARVRGAPYEYNYRGQGTQVTVSS

SEQ ID NO: 531 - protein, 118 aa, synthetic construct
EVQLVESGGGLVQPGGSLRLSCAASGFTFSMYSMSWVRQAPGKGPEWVSAIDTRGSTRYADSVKGRFTISRDNAKNTLYLQMDSLKPEDTALYYCARVGGTPYEYGYRGQGTQVTVSS

SEQ ID NO: 532 - protein, 118 aa, synthetic construct
EVQLVESGGGLVQPGGSLRLSCAASGFNFSMYSMSWVRQAPGKGPEWVSAIDTRGSTRYADSVKGRFTISRDNAKNTLYLQMDSLKPEDTALYYCARVGGAPYEYNYRGQGTQVTVSS

SEQ ID NO: 533 - protein, 118 aa, synthetic construct
EVQLVESGGGLVQPGGSLRLSCAASGFNFSMYSMSWVRQAPGKGPEWVSAIDTGGSTRYADSVKGRFTISRDNAKNTLYLQMDSLKPEDTALYYCARVGGTPYEYGYRGQGTQVTVSS

SEQ ID NO: 534 - protein, 118 aa, synthetic construct
EVQLVESGGGLVQPGGSLRLSCAASGFTFSKYSMSWVRQAPGKGPEWVSAIDTRGSTRYADSVKGRFTISRDNAKHTLYLQMDSLKPEDTALYYCARVGGAPYEYNYRGQGTQVTVSS

SEQ ID NO: 535 - protein, 118 aa, synthetic construct
EVQLVESGGGSVQPGGSLRLSCAASGFTFSMYSMSWVRQAPGKGPEWVSAIDTGGSTRYADSVMGRFTISRDNAKNTLYLQMDSLKPEDTGLYYCARVRGSPYEYNYRGQGTQVTVSS

SEQ ID NO: 536 - protein, 118 aa, synthetic construct
EVQLVESGGGLVQPGGSLRLSCAASGFTFSMYSMSWVRQAPGKGPEWVSAIDTGGSTRYADFVMGRFTISRDNAKNTLYLQMDSLKPEDTGLYYCARVRGSPYEYNYRGQGTQVTVSS

SEQ ID NO: 537 - protein, 118 aa, synthetic construct
EVQLVESGGGLVQPGGSLRLSCAASGFTFSMYSMSWVRQAPGKGPEWVSAIDTGGSTRYADSVMGRFTISRDNAKNTLYLQMDSLKPEDTGLYYCARVRGSPYGYNYRGQGTQVTVSS

SEQ ID NO: 538 - protein, 118 aa, synthetic construct
EVQLVESGGGLVQPGGSLRLSCAASGFTFSMYSMSWVRQAPGKGPEWVSAIDTGGSTRYADSVMGRFTISRDNAKNTLYLQVDSLKPEDTGLYYCARVRGSPYGYNYRGQGTQVTVSS

SEQ ID NO: 539 - protein, 118 aa, synthetic construct
EVQLVESGGGLVEAGGSLRLSCAASGRTFRSYTMGWFRQAPGRESEFLASIRWTGGSTSYADSVKGRFTISRDNVNEAVYLQMNSLKPEDTAVYYCAAAPTGRAFTYWGQGTQVTVSS

SEQ ID NO: 540 - protein, 118 aa, synthetic construct
EVQLVESGGGLVEAGGSLRLSCAASGHTFGSYTVGWFRQAPGREREFLASIRWTGGSTSYADSVKGRFTISRDNAKKAVYLQMNSLKPEDTAVYYCTASPTGRAFTYWGQGTQVTVSS

SEQ ID NO: 541 - protein, 118 aa, synthetic construct
EVQLVESGGGLVEAGGSLRLSCAASGRTFRNYTMGWFRQAPGREREFLASIRWTGGSTSYADSVKGRFTISRDDAKKAVYLQMNSLKPEDTAVYYCTAAPTGRAFAYWGQGTQVTVSS

SEQ ID NO: 542 - protein, 118 aa, synthetic construct
EVQLVESGGGLVQAGGSLRLSCAASGRTFRNYTMGWFRQAPGREREFLASIRWTGGSTSYADSVKGRFTISRDDAKKAVYLQMNSLKPEDTAVYYCTAAPTGRAFAYWGQGTQVTVSS

SEQ ID NO: 543 - protein, 118 aa, synthetic construct
EVQLVESGGGLVQAGGSLRLSCAASGHTFGSYTVGWFRQAPGREREFLASIRWTGGSTSYADSVKGRFTISRDNAKKAVYLQMNSLKPEDTAVYYCTASPTGRAFTYWGQGTQVTVSS

SEQ ID NO: 544 - protein, 118 aa, synthetic construct
EVQLVESGGGLVEAGGSLRLSCAASGRTLRNYTMGWFRQAPGREREFLASIRWTGGSTSYADSVKGRFTISRDDAKKAVYLQMNSLKPEDTAVYYCTAAPTRRAFAYWGQGTQVTVSS

SEQ ID NO: 545 - protein, 118 aa, synthetic construct
EVQLVESGGGLVEAGGSLRLSCAASGRTFRSYTMGWFRQAPGREREFLASIRWTGGSTSYADSVKGRFTISRDDAKKAVYLQMNSLKPEDTAVYYCTAAPTRRAFAYWGQGTQVTVSS

SEQ ID NO: 546 - protein, 118 aa, synthetic construct
EVQLVESGGGLVEAGGSLRLSCAASGRTFRNYTMGWFRQAPGREREFLASIRWTGGSTSYADSVKGRFTISRDDAKKAVYLQMNSLKPEDTAVYYCTAAPTRRAFAYWGQGTQVTVSS

SEQ ID NO: 547 - protein, 118 aa, synthetic construct
EVQLVESGGGLVQAGGSLRLSCAASGRTFSSYTMGWFRQAPGKEHEFVAAIRWATLTTTYADSAKGRFTISRDNANNTVYLEMNSLKPEDTGLYYCAAAPTGRSFAYWGLGTQVTVSS

SEQ ID NO: 548 - protein, 118 aa, synthetic construct
EVQLVESGGGLVQPGGSLRLSCAASGRTFRNYTMGWFRQAPGREREFLASIRWTGGSTSYADSVKGRFTISRDDAKKAVYLQMNSLKPEDTAVYYCTAAPTGRAFAYWGQGTQVTVSS

SEQ ID NO: 549 - protein, 118 aa, synthetic construct
EVQLVESGGGLVETGGSLRLSCAASERTFESDTMGWFRQAPGREREFLASIRWPGGSTSYANSVKGRFTISRDNAKKAVYLQMNSLKPEDTAVYSCAAAPTGRAFTYEGQGTQVTVSS

SEQ ID NO: 550 - protein, 118 aa, synthetic construct
EVQLVESGGGLVEAGGSLRLSCAASGRTFRNYTMGWFRQAPGRESEFLASIRWTGGSTSYADSVKGRFTISRDNAKTAVYLQMNSLKPEDTALYYCAAAPTGRAFTYWGQGTQVTVSS

SEQ ID NO: 551 - protein, 118 aa, synthetic construct
EVQLVESGGGLVEAGGSLRLSCAASGRTFRNYTMGWFRQAPGRESEFLASIRWTGGSTSYADSVKGRFTISRDNAKKAVYLQMNSLKPEDTAVYYCAAAPTGRAFTYWGQGTQVTVSS

SEQ ID NO: 552 - protein, 118 aa, synthetic construct
EVQLVESGGGLVEAGGSLRLSCAASGRTFRNYTMGWFRQAPGREREFLASIRWTGGSTSYADSVKGRFTISRDDAKKAVYLQMNSLKPEDTAVYYCTAAPTVRAFAYWGQGTQVTVSS

SEQ ID NO: 553 - protein, 118 aa, synthetic construct
EVQLVESGGGLVEAGGSLRLSCAASGHTFGSYTVGWFRQAPGREREFLASIKWTGGSTSYADSVKGQFTISRDNAKKAVYLQMNSLKPEDTAVYYCTASPTGRAFTYWGQGTQVTVSS

SEQ ID NO: 554 - protein, 118 aa, synthetic construct
EVQLVESGGGLVEAGGSLRLSCAASGHTFGSYTVGWFRQAPGREREFLASIRRTGGSTSYADSVKGRFTISRDNAKKAVYLQMNSLKPEDTAVYYCTASPTGRAFTYWGQGTQVTVSS

SEQ ID NO: 555 - protein, 118 aa, synthetic construct
EVQLVESGGGLVETGGSLRLSCAASGRTFGNYTMGWFRQAPGREREFLASIRWTGGSTSYADSVKGRFTISRDDAKKAVYLQMNSLKPEDTAVYYCTAAPTGRAFAYWGQGTQVTVSS

SEQ ID NO: 556 - protein, 118 aa, synthetic construct
EVQLVESGGGLVEAGGSLRLSCAASGRTFRNYTMGWFRQAPGREREFLASIRWTGGSTSYADSVKGRFTISRDDAKKAVYLQMNSLKPEDTAVYYCTAAPAGRAFAYWGQGTQVTVSS

SEQ ID NO: 557 - protein, 118 aa, synthetic construct
EVQLVESGGGLVEAGGSLRLSCAASGRTFRNYTMGWFRQAPGREREFLASIRRTGGSTSYADSVKGRFTISRDDAKKAVYLQMNSLKPEDTAVYYCTAAPTGRAFAYWGQGTQVTVSS

SEQ ID NO: 558 - protein, 118 aa, synthetic construct
EVQLVESGGGLVEAGGSLRLSCAASGRTFRNYTMGWFRQAPGREREFLASIRWTGRSTSYADSVKGRFTISRDDAKKAVYLQMNSLKPEDTAVYYCTAAPTGRAFAYWGQGTQVTVSS

SEQ ID NO: 559 - protein, 118 aa, synthetic construct
EVQLVESGGGLVEAGGSLRLSCAASGRTFRNYTMGWFRQAPGREREFLASIRWTGGSTSYADSVKGRFTISRDDAKKAVYLQMNSLKPEDTAVYYCTAAPTGRAFDHRGRGTQVTVSS

SEQ ID NO: 560 - protein, 118 aa, synthetic construct
EVQLVESGGGLVETGGSLRLSCAASERTFESDTMGWFRQAPGREREFLASIRWPGGSTSYANSVKGRFTISRDNAKKAVYLQMNSLKPEDTAVYSCAAAPTGKAFTYEGQGTQVTVSS

SEQ ID NO: 561 - protein, 118 aa, synthetic construct
EVQLVESGGGLVQAGGSLRLSCLASGRTFSSYFMGWFRQAPGKEREFVASIRYPGLITNYADSAKGRFIISRDSAKNTVYLQMNSLKPEDTGLYYCAAAPTGQAFNIGGLGTQVTVSS

SEQ ID NO: 562 - protein, 118 aa, synthetic construct
EVQLVESGGGLVQAGGSLRLSCLASGRTFSSYFMGWFRQAPGKEHEFVASIRYPGLITNYADSAKGRFIISRDSAKNTVYLQMNSLKPEDTGLYYCAAAPTGQAFNYWGLGTQVTVSS

SEQ ID NO: 563 - protein, 118 aa, synthetic construct
EVQLVESGGGLVQAGGSLRLSCLASGRTFSSYFMGWFRQAPGKEHEFVASIRYPGLITNYADSAKGRFIISRDSAKNTVYLQMNSLKPEDTGLYYCAAAPTGKAFNYWGLGTQVTVSS

SEQ ID NO: 564 - protein, 116 aa, synthetic construct
EVQLVESGGGLVQAGGSLRLSCAASGSIFRFPPMGWYRQAPGKQREEVAQLTSGGSTNYADSVKGRFTISRDNAKNTWYLQMSSLRPEDTAVYYCSVVGRDMVTYWGQGTQVTVSS

SEQ ID NO: 565 - protein, 116 aa, synthetic construct
EVQLVESGGGLVQAGGSLRLSCAASGNIFRFPPMGWYRQATGKQREQVAQLTSGGSTNYADSVKGRFTISRDNAKNTWYLQMSSLRPEDTAAYYCSVVGRDMMTYWGQGTQVTVSS

SEQ ID NO: 566 - protein, 116 aa, synthetic construct
EVQLVESGGGLVQAGGSLRLSCAASGNIFRFPPMGWYRQAPGKQREQVAQLTSGGSTNYADSVKGRFTISRDNAKNTWYLQMSSLRPEDTAAYYCSVVGRDMMTYWGQGTQVTVSS

SEQ ID NO: 567 - protein, 116 aa, synthetic construct
EVQLVESGGGLVQAGGSLRLSCAASGSIFRFPPMGWYRQAPGKQREQVAQLTSGGSTNYADSVKGRFTISRDNAKNTWYLQMSSLRPEDTAVYYCSVLGRDMMTYWGQGTQVTVSS

SEQ ID NO: 568 - protein, 116 aa, synthetic construct
EVQLVESGGGLVQAGGSLRLSCAASGSIFRFPPMGWYRQAPGKQREQVAQLTSGGSTNYADSVKGRFTISRDNAKNTWYLQMSSLRPEDTAVYYCSMVGRDMMTYWGQGTQVTVSS

SEQ ID NO: 569 - protein, 116 aa, synthetic construct
EVQLVESGGGLVQPGGSLRLSCAASGSIFRFPPMGWYRQAPGKQREQVAQLTSGGSTNYADSVKGRFTISRDNAKNTWYLQMSSLRPEDTAVYYCSMVGRDMMTYWGQGTQVTVSS

SEQ ID NO: 570 - protein, 116 aa, synthetic construct
EVQLVESGGGLVQAGGSLRLSCAASGSIFRFPPMGWYRQAPGKQREEVAQLTSGGSTNYADSVKGRFTISRDNAKNTWYLQMSSLRPEDTAVYYCSVVGRDMMTYWGQGTQVTVSS

SEQ ID NO: 571 - protein, 116 aa, synthetic construct
EVQLVESGGGLVQAGGSLRLSCAASGSIFRFPPMGWYRQAPGKQREQVAQLTSGGSTNYADSVKGRFTISRDNAKNTWYLQMSSLRPEDTAVYYCSVIGRDMMTYWGQGTQVTVSS

SEQ ID NO: 572 - protein, 116 aa, synthetic construct
EVQLVESGGGLVQAGGSLRLSCAASGSIFRFPPMGWYRQAPGKQREQVAQLTSGGSTNYADSVKGRFTISRDNAKNTWYLQMSSLRPEDTAVYYCYMVGRDMMTYWGQGTQVTVSS

SEQ ID NO: 573 - protein, 116 aa, synthetic construct
EVQLVESGGGLVQAGGSLRLSCAASGSIFRFPPMGWYRQAPGKQREQVAQLTSGGSTNYADSVKGRFTISRDNAKNTWYLQMSSLRPEDTAVYYCSMLGRDMMTYWGQGTQVTVSS

SEQ ID NO: 574 - protein, 116 aa, synthetic construct
EVQLVESGGGLVQAGGSLRLSCAASGSIFRFPPMGWYRQAPGKQREQVAQLTSGGSTNYADSVKGRFTISRDNAKNTWYLQMSSLRPEDTAVYYCSLVGRDMMTYWGQGTQVTVSS

SEQ ID NO: 575 - protein, 116 aa, synthetic construct
EVQLVESGGDLVQAGGSLRLSCAASGSIFRFPPMGWYRQAPGKQREQVAQLTSGGSTNYADSVKGRFTISRDNAKNTWYLQMSSLRPEDTAVYYCSVLGRDMMTYWGQGTQVTVSS

SEQ ID NO: 576 - protein, 116 aa, synthetic construct
EVQLVESGGGLVQAGGSLRLSCAASGSIFRFPPMGWYRQAPGKQREQVAQLTSGGSTNYADSVKGRFTISRDNAKNTWYLQMSSLRPEDTAVYYCSVRGRDMMTYWGQGTQVTVSS

SEQ ID NO: 577 - protein, 116 aa, synthetic construct
EVQLVESGGGLVQAGGSLRLSCAASGSIFRFPPMGWYRQAPGKQREQVAQLTSGGSTNYADSVKGRFTISRDNAKNTWYLQMSSLRPEDTAVYYCSRVGRDMMTYWGQGTQVTVSS

SEQ ID NO: 578 - protein, 116 aa, synthetic construct
EVQLVESGGGLVQAGGSLRLSCAASGSIFRFPPMGWYRQAPGKQREQVAQLTSGGSTNYADSVKGRFTISRDNAKNTWYLQMSSLRPEDTAVYYCSMVGRDMRTYWGQGTQVTVSS

SEQ ID NO: 579 - protein, 116 aa, synthetic construct
EVQLVESGGGLVQAGGSLRLSCAASGSIFRFPPMGWYRQAPGKQREQVAQLTSGGSTNYADSVKGRFTISRDNAKNTWYLQMSSLRPEDTAVYYCSALGRDMMTYWGQGTQVTVSS

SEQ ID NO: 580 - protein, 116 aa, synthetic construct
EVQLVESGGGLVQAGGSLRLSCAASGSIFRFPPMGWYRQAPGKQREQVAQLTSGGSTNYADSVKGRFTISRDNAKNTWYLQMSSLRPEDTAVYYCSMVGRDMMTDWGQGTQVTVSS

SEQ ID NO: 581 - protein, 116 aa, synthetic construct
EVQLVESGGDLVQAGGSLRLSCAASGSIFRFPPMGWYRQAPGKQREQVAQLTSGGSTNYADSVKGRFTISRDNAKNTWYLQMSSLRPEDTAVYYCSMVGRDMMTYWGQGTQVTVSS

SEQ ID NO: 582 - protein, 116 aa, synthetic construct
EVQLVESGGGLVQAGGSLRLSCAASGSIFRFPPMGWYRQAPGKQREQVAQLTSGGSTNYADSVKGRFTISRDNAKNTWYLQMSSLRPEDTAVYYCSELGRDMMTYWGQGTQVTVSS

SEQ ID NO: 583 - protein, 116 aa, synthetic construct
EVQLVESGGGSVQAGGSLRLSCAASGSIFRFPPMGWYRQAPGKQREQVAQLTSGGSTNYADSVKGRFTISRDNAKNTWYLQMSSLRPEDTAVYYCSMVGRDMMTYWGQGTQVTVSS

SEQ ID NO: 584 - protein, 116 aa, synthetic construct
EVQLVESGGGSVQAGGSLRLSCAASGSIFRFPPMGWYRQAPGKQREQVAQLTSGGSTNYADSVKGRFTISRDNAKNTWYLQMSSLRPEDTAVYYCSMLGRDMMTYWGQGTQVTVSS

SEQ ID NO: 585 - protein, 116 aa, synthetic construct
EVQLVESGGGLVQAGGSLRLSCAASGSIFRFPPMGWYRQAPGKQREQVAQLTSGGSANYADSVKGRFTISRDNAKNTWYLQMSSLRPEDTAVYYCSMVGRDMMTYWGQGTQVTVSS

SEQ ID NO: 586 - protein, 116 aa, synthetic construct
EVQLVESGGDLVQAGGSLRLSCAASGSIFRFPPMGWYRQAPGKQREEVAQLTSGGSTNYADSVKGRFTISRDNAKNTWYLQMSSLRPEDTAVYYCSVVGRDMVTYWGQGTQVTVSS

SEQ ID NO: 587 - protein, 116 aa, synthetic construct
EVQLVESGGGLVQAGGSLRLSCAASGSIFRFPPMGWYRQAPGKQREQVAQLTSGGSTNYADSVKGRFTISRDNAKNTWYLQMSSLRPEDTAVYYCSVPGRDMMTYWGQGTQVTVSS

SEQ ID NO: 588 - protein, 116 aa, synthetic construct
EVQLVESGGGSVQAGGSLRLSCAASGSIFRFPPMGWYRQAPGKQREQVAQLTSGGSTNYADSVKGRFTISRDNAKNTWYLQMSSLRPEDTAVYYCSVLGRDMMTYWGQGTQVTVSS

SEQ ID NO: 589 - protein, 116 aa, synthetic construct
EVQLVESGGGLVQAGGSLRLSCAASGSIFRFPPMGWYRQAPGKQRELVAQLTSGGSTNYADSVKGRFTISRDNAKNTWYLQMSSLRPEDTAVYYCSVVGRDMVTYWGQGTQVTVSS

SEQ ID NO: 590 - protein, 116 aa, synthetic construct
EVQLVESGGGLVQAGGSLRLSCAASGSIFRFPPMGWYRQAPGKQREQVAQLTSGGSTNYADSVKGRFTISRDNAKNAWYLQMSSLRPEDTAVYYCSVLGRDMMTYWGQGTQVTVSS

SEQ ID NO: 591 - protein, 116 aa, synthetic construct
EVQLVESGGDLVQAGGSLRLSCAASGSIFRFPPMGWYRQAPGKQREQVAQLTSGGSTNYADSVKGRFTISRDNAKNTWYLQMSSLRPEDTAVYYCSMLGRDMMTYWGQGTQVTVSS

SEQ ID NO: 592 - protein, 116 aa, synthetic construct
EVQLVESGGGLVQAGGSLRLSCAASGSIFRFPPMGWYRQAPGKQREQVAQLTSGGSTNYADSVKGRFTISRDNDKNTWYLQMSSLRPEDTAVYYCSVIGRDMMTYWGQGTQVTVSS

SEQ ID NO: 593 - protein, 116 aa, synthetic construct
EVQLVESGGGLVQPGGSLRLSCAASGSIFRFPPMGWYRQAPGKQREQVAQLTSGGSTNYADSVKGRFTISRDNAKNTWYLQMSSLRPEDTAVYYCYMVGRDMMTYWGQGTQVTVSS

SEQ ID NO: 594 - protein, 116 aa, synthetic construct
EVQLVESGGGLVQAGGSLRLSCAASGSIFRFPPMGWYRQAPGKQREQVAQLTSGGSTNYADSVKGRFTISRDNAKNTWYLQMSSLRPEDTAVYYCSLLGRDMMTYWGQGTQVTVSS

SEQ ID NO: 595 - protein, 116 aa, synthetic construct
EVQLVESGGGLVQAGGSLRLSCAASGSIFRFPPMGWYRQAPGKQREQVAQLTSGGSTNYADSVKGRFTISRDNAKNTWYLQMSSLRPEDTAVYYCSGLGRDMMTYWGQGTQVTVSS

SEQ ID NO: 596 - protein, 116 aa, synthetic construct
EVQLVESGGGLVQAGGSLRLSCAASGSIFRFPPMGWYRQAPGKQREQVAQLTSGGSTNYADSVKGRFTISRDNAKNTWYLQMSSLRPEDTAVYYCSMVGRDMLTYWGQGTQVTVSS

SEQ ID NO: 597 - protein, 116 aa, synthetic construct
EVQLVESGGGLVQAGGSLRLSCAASGSIFRFPPMGWYRQAPGKQREQVAQLTSGGSTNYADSVKGRFTISRDNAKNTWYLQMSSLRPEDTAVYYCSMVGRDLMTYWGQGTQVTVSS

SEQ ID NO: 598 - protein, 116 aa, synthetic construct
EVQLVESGGGLVQAGGSLRLSCAASGSIFRFPPMGWYRQAPGKQREQVAQLTSGGSTNYADSVKGRFTISRDNAKNTWYLQMSSLRPEDTAVYYCSMGGRDMMTYWGQGTQVTVSS

SEQ ID NO: 599 - protein, 116 aa, synthetic construct
EVQLVESGGGLVQAGGSLRLSCAASGSIFRFPPMGWYRQAPGKQREQVAQLTSGGSTNYADSVKGRFTISRDNAKNTWYLQMSSLRPEDTAVYYCSIVGRDMMTYWGQGTQVTVSS

SEQ ID NO: 600 - protein, 116 aa, synthetic construct
EVQLVESGGGLVQAGGSLRLSCAASGSIFRFPPMGWYRQAPGKQREQVAQLTSGGSTNYADSVKGRFTISRDNAKNTWYLQMSSLRPEDTAVYYCSMVVRDMMTYWGQGTQVTVSS

SEQ ID NO: 601 - protein, 116 aa, synthetic construct
EVQLVESGGGLVQAGGSLRLSCAASGSIFRFPPMGWYRQAPGKQREQVAQLTSGGSTNYADSVKGRFTISRDNAKNTWYLQMSSLRPEDTAVYYCTMVGRDMMTYWGQGTQVTVSS

SEQ ID NO: 602 - protein, 116 aa, synthetic construct
EVQLVESGGGLVQAGGSLRLSCAASGSIFRFPPMGWYRQAPGKQREQVAQLTSGGSTNYADSVKGRFTISRDNAKNTWYLQMSSLRPEDTAVYYCSMVGSDMMTYWGQGTQVTVSS

SEQ ID NO: 603 - protein, 116 aa, synthetic construct
EVQLVESGGGLVQAGGSLRLSCAASGSIFRFPPMGWYRQAPGKQREQVAQLTSGGSTNYADSVKGRFTISRDNAKNTWYLQMSSLRPEDTAVYYCSVLGRDKMTYWGQGTQVTVSS

SEQ ID NO: 604 - protein, 116 aa, synthetic construct
EVQLVESGGGLVQAGGSLRLSCAASGGIFRFPPMGWYRQAPGKQREQVAQLTSGGSTNYADSVKGRFTISRDNAKNTWYLQMSSLRPEDTAVYYCSVLGGDMMTYWGQGTQVTVSS

SEQ ID NO: 605 - protein, 116 aa, synthetic construct
EVQLVESGGGLVQAGGSLRLSCAASGSIFRFPPMGWYRQAPGKQREQVAQLTSGGSTNYADSVKGRFTISRDNAKNTWYLQMSSLRPEDTAVYYCYVLGRDMMTYWGQGTQVTVSS

SEQ ID NO: 606 - protein, 116 aa, synthetic construct
EVQLVESGGGLVQAGGSLRLSCAASGSIFRFPPMGWYRQAPGKQREQVAQLTSGGSTNYADSVKGRFTISRDNAKNTWYLQMSSLRPEDTAVYYCSVLGRDMMTDWGQGTQVTVSS

SEQ ID NO: 607 - protein, 116 aa, synthetic construct
EVQLVESGGGLVQAGGSLRLSCAASGSIFRFPPMGWYRQAPGKQREQVAQLTSGGSTNYADSVKGRFTISRDNAKNTWYLQMSSLRPEDTAVYYCSVLGSDMMTYWGQGTQVTVSS

SEQ ID NO: 608 - protein, 116 aa, synthetic construct
EVQLVESGGGSVQAGGSLRLSCAASGSIFRFPPMGWYRQAPGKQREQVAQLTSGGSTNYADSVKGRFTISRDNAKNTWYLQMSSLRPEDTAVYYCSVLGSDMMTYWGQGTQVTVSS

SEQ ID NO: 609 - protein, 116 aa, synthetic construct
EVQLVESGGDLVQAGGSLRLSCAASGSIFRFPPMGWYRQAPGKQREQVAQLTSGGSTNYADSVKGRFTISRDNAKNTWYLQMSSLRPEDTAVYYCSVLGSDMMTYWGQGTQVTVSS

SEQ ID NO: 610 - protein, 116 aa, synthetic construct
EVQLVESGGGLVQAGGSLRLSCAASGSIFRFPPMGWYRQAPGKQREQVAQLTSGGSTNYADSVKGRFTISRDNAKNTWYLQMSSLRPEDTAVYYCSVLGGDMMTYWGQGTQVTVSS

SEQ ID NO: 611 - protein, 116 aa, synthetic construct
EVQLVESGGGLVQPGGSLRLSCAASGSIFRFPPMGWYRQAPGKQREQVAQLTSGGSTNYADSVKGRFTISRDNAKNTWYLQMSSLRPEDTAVYYCSVLGGDMMTYWGQGTQVTVSS

SEQ ID NO: 612 - protein, 116 aa, synthetic construct
EVQLVESGGGLVQAGGSLRLSCAASGSIFRFPPMGWYRQAPGKQREQVAQLTSGGSTNYADSVKGRFTISRDNAKNTWYLQMSSLRPEDTAVYYCSVLGRDMRTYWGQGTQVTVSS

SEQ ID NO: 613 - protein, 116 aa, synthetic construct
EVQLVESGGGLVQAGGSLRLSCAASGSIFRFPPMGWYRQAPGKQREQVAQLTSGGSTNYADSVKGRFTISRDNAKNTWYLQMSSLRPEDTAVYYCAVLGRDMMTYWGQGTQVTVSS

SEQ ID NO: 614 - protein, 116 aa, synthetic construct
EVQLVESGGGLVQAGGSLRLSCAASGSIFRFPPMGWYRQAPGKQREQVAQLTSGGSTNYADSVKGRFTISRDNAKNTWYLQMSSLRPEDTAVYYCSVLGRDMLTYWGQGTQVTVSS

SEQ ID NO: 615 - protein, 116 aa, synthetic construct
EVQLVESGGGLVQAGGSLRLSCAASGSIFRFPPMGWYRQAPGKQREQVAQLTSGGSTNYADSVKGRFTISRDNAKNTWYLQMSSLRPEDTAVYYCSVLGRDLMTYWGQGTQVTVSS

SEQ ID NO: 616 - protein, 116 aa, synthetic construct
EVQLVESGGGLVQAGGSLRLSCAASGSIFRFPPMGWYRQAPGKQREQVAQLTSGGSTNYADSVKGRFTISRDNAKNTWYLQMSSLRPEDTAVYYCSVLVRDMMTYWGQGTQVTVSS

SEQ ID NO: 617 - protein, 116 aa, synthetic construct
EVQLVESGGGLVQAGGSLRLSCAASGSIFRFPPMGWYRQAPGKQREQVAQLTSGGSTNYADSVKGRFTISRDNAKNTWYLQMSSLRPEDTAVYYCSVLGRDRMTYWGQGTQVTVSS

SEQ ID NO: 618 - protein, 116 aa, synthetic construct
EVQLVESGGGLVQAGGSLRLSCAASGSIFRFPPMGWYRQAPGKQREQVAQLTSGGSTNYADSVKGRFTISRDNAKNTWYLQMSSLRPEDTAVYYCSVLGRYMMTYWGQGTQVTVSS

SEQ ID NO: 619 - protein, 116 aa, synthetic construct
EVQLVESGGGLVQAGGSLRLSCAASGSIFRFPPMGWYRQAPGKQREQVAQLTSGGSTNYADSVKGRFTISRDNAKNTWYLQMSSLRPEDTAVYYCSVLGRDMMTSWGQGTQVTVSS

SEQ ID NO: 620 - protein, 116 aa, synthetic construct
EVQLVESGGGLVQAGGSLRLSCAASGSIFRFPPMGWYRQAPGKQREQVAQLTSGGSTNYADSVKGRFTISRDNAKNTWYLQMSSLRPEDTAVYYCSVLGRDMMAYWGQGTQVTVSS

SEQ ID NO: 621 - protein, 116 aa, synthetic construct
EVQLVESGGGLVQAGGSLRLSCAASGSIFRFPPMGWYRQAPGKQREQVAQLTSGGSTNYADSVKGRFTISRDNAKNTWYLQMSSLRPEDTAVYYCSVLGRDMMPYWGQGTQVTVSS

SEQ ID NO: 622 - protein, 116 aa, synthetic construct
EVQLVESGGGLVQAGGSLRLSCAASGSIFRFPPMGWYRQAPGKQREQVAQLTSGGSTNYADSVKGRFTISRDNAKNTWYLQMSSLRPEDTAVYYCSVLGRDMITYWGQGTQVTVSS

SEQ ID NO: 623 - protein, 116 aa, synthetic construct
EVQLVESGGGLVQAGGSLRLSCAASGSIFRFPPMGWYRQAPGKQREQVAQLTSGGSTNYADSVKGRFTISRDNAKNTWYLQMSSLRPEDTAVYYCTVLGRDMMTYWGQGTQVTVSS

SEQ ID NO: 624 - protein, 116 aa, synthetic construct
EVQLVESGGDLVQAGGSLRLSCAASGSIFRFPPMGWYRQAPGKQREQVAQLTSGGSTNYADSVKGRFTISRDNAKNTWYLQMSSLRPEDTAVYYCSVLGRDKMTYWGQGTQVTVSS

SEQ ID NO: 625 - protein, 116 aa, synthetic construct
EVQLVESGGGLVQAGGSLRLSCAASGSTFRFPPMGWYRQAPGKQREQVAQLTSGGSTNYADSVKGRFTISRDNAKNTWYLQMSSLRPEDTAVYYCYVLGRDMMTYWGQGTQVTVSS

SEQ ID NO: 626 - protein, 116 aa, synthetic construct
EVQLVESGGGLVQAGGSLRLSCAASGSIFRFPPMGWYRQAPGKQREQVAQLTSGGSTNYADSVKGRFTISRDNAKNTWYLQMSSLRPEDTAVYYCSVLGRDMMTHWGQGTQVTVSS

SEQ ID NO: 627 - protein, 116 aa, synthetic construct
EVQLVESGGGLVQAGGSLRLSCAASGSIFRFPPMGWYRQAPGKQREQVAQLTSGGSTNYADSVKGRFTISRDNAKNTWYLQMSSLRPEDTAVYYCFVLGRDMMTYWGQGTQVTVSS

SEQ ID NO: 628 - protein, 116 aa, synthetic construct
EVQLVESGGGLVQAGGSLRLSCAASGSTFRFPPMGWYRQAPGKQREQVAQLTSGGSTNYADSVKGRFTISRDNAKNTWYLQMSSLRPEDTAVYYCSVLGRDMRTYWGQGTQVTVSS

SEQ ID NO: 629 - protein, 116 aa, synthetic construct
EVQLVESGGGSVQAGGSLRLSCAASGSIFRFPPMGWYRQAPGKQREQVAQLTSGGSTNYADSVKGRFTISRDNAKNTWYLQMSSLRPEDTAVYYCYVLGRDMMTYWGQGTQVTVSS

SEQ ID NO: 630 - protein, 116 aa, synthetic construct
EVQLVESGGGSVQAGGSLRLSCAASGSIFRFPPMGWYRQAPGKQREQVAQLTSGGSTNYADSVKGRFTISRDNAKNTWYLQMSSLRPEDTAVYYCSVLGRDKMTYWGQGTQVTVSS

SEQ ID NO: 631 - protein, 116 aa, synthetic construct
EVQLVESGGGLVQAGGSLRLSCAASGSIFRFPPMGWYRQAPGKQREQVAQLTSGGSTNYADSVKGRFTISRDNAKNTWDLQMSSLRPEDTAVYYCSVLGRDMMTDWGQGTQVTVSS

SEQ ID NO: 632 - protein, 116 aa, synthetic construct
EVQLVESGGDLVQAGGSLRLSCAASGSIFRFPPMGWYRQAPGKQREQVAQLTSGGSTNYADSVKGRFTISRDNAKNTWYLQMSSLRPEDTAVYYCSVLGRDMMTDWGQGTQVTVSS

SEQ ID NO: 633 - protein, 116 aa, synthetic construct
EVQLVESGGDLVQAGGSLRLSCAASGSIFRFPPMGWYRQAPGKQREQVAQLTSGGSTNYADSVKGRFTISRDNAKNTWYLQMSSLRPEDTAVYYCAVLGRDMMTYWGQGTQVTVSS

SEQ ID NO: 634 - protein, 116 aa, synthetic construct
EVQLVESGGGLVQAGGSLRLSCAASGSIFRFPPMGWYRQAPGKQREQVAQLTSGGSTNYADSVKGRFTISRDNAKNTWYLQMSSLRPEDTAVYYCSVLGREMMTYWGQGTQVTVSS

SEQ ID NO: 635 - protein, 116 aa, synthetic construct
EVQLVESGGGLVQAGGSLRLSCAASGSIFRFPPMGWYRQAPGKQREQVAQLTSGGSTNYADSVKGRFTISRDNAKNTWYLQMSSLRPEDTAVYYCSVLGRVMMTYWGQGTQVTVSS

SEQ ID NO: 636 - protein, 116 aa, synthetic construct
EVQLVESGGGLVQAGGSLRLSCAASGSIFRFPPMGWYRQAPGKQREQVAQLTSGGSTNYADSVKGRFTISRDNAKNTWYLQMSSLRPEDTAVYYCSVLGRDMMSYWGQGTQVTVSS

SEQ ID NO: 637 - protein, 116 aa, synthetic construct
EVQLVESGGGLVQAGGSLRLSCAASGSIFRFPPMGWYRQAPGKQREQVAQLTSGGSTNYADSVKGRFTISRDNAKNTWYLQMSSLRPEDTAVYYCSVLGRDMMKYWGQGTQVTVSS

SEQ ID NO: 638 - protein, 116 aa, synthetic construct
EVQLVESGGGLVQAGGSLRLSCAASGSIFRFPPMGWYRQAPGKQREQVAQLTSGGSTNYADSVKGRFTISRDNAKNTWYLQMSSLRPEDTAVYYCSVLGIDMMTYWGQGTQVTVSS

SEQ ID NO: 639 - protein, 116 aa, synthetic construct
EVQLVESGGGLVQAGGSLRLSCAASGSIFRFPPMGWYRQAPGKQREQVAQLTSGGSTNYADSVKGRFTISRDNAKNTWYLQMSSLRPEDTAVYYCSVLRRDMMTYWGQGTQVTVSS

SEQ ID NO: 640 - protein, 116 aa, synthetic construct
EVQLVESGGGLVQAGGSLRLSCAASGSIFRFPPMGWYRQAPGKQREQVAQLTSGGSTNYADSVKGRFTISRDNAKNTWYLQMSSLRPEDTAVYYCSVLGRDMVTYWGQGTQVTVSS

SEQ ID NO: 641 - protein, 120 aa, synthetic construct
EVQLVESGGGLVQPGGSLRVSCAASGSIFRTDAMGWHRQAPGKQREFVAGIRSDGYTNYADSVKGRFTISRDTVKNTVYLQMNSLRPEDTAVYYCYYQSLSSPNYGQVFWGQGTQVTVSS

SEQ ID NO: 642 - protein, 120 aa, synthetic construct
EVQLVESGGGLVQPGGSLRLSCAASGSIVSTKAMGWHRQAPGKRRELVAGIRSDGFTNYADSVKGRFTISSDSVKDTVYLQMNSLRAEDTAVYYCFYQSLSTPSYGQTFWGQGTQVTVSS

SEQ ID NO: 643 - protein, 120 aa, synthetic construct
EVQLVESGGGLVQPGGSLRVSCAASGSIFRTDAMGWHRQAPGKQREFVAGIRSDGFTNYADSVKGRFTISRDTVKNTVYLQMNSLRPEDTAVYYCYYQSLSSPNYGQVFWGQGTQVTVSS

SEQ ID NO: 644 - protein, 120 aa, synthetic construct
EVQLVESGGGLVQPGGSLRLSCAASGSIVSTNGMGWHRQAPGKGRELVAGIRSDGFTNYADSVKGRFTISSDNVKNTVYLQMNSLRAEDTGVYYCYYQSLSTPNYGQTFWGQGTQVTVSS

SEQ ID NO: 645 - protein, 120 aa, synthetic construct
EVQLVESGGGLVQPGGSLRLSCAASGSIVSTNSMGWHRQAPGKQRELVAGIRSDGFINYADSVKGRFTISSDNVKNTVYLQMNSLRPEDTAVYYCFYQSLSTPNFGQVFWGQGTQVTVSS

SEQ ID NO: 646 - protein, 120 aa, synthetic construct
EVQLVESGGGLVQPGGSLRLSCAASGSIFSLNGMGWYRQAPGKQRELVAGIRSDGLVNYADSVKGRFTISGDNAKSTVYLQMNSLRPEDTAVYYCYYQSLSTPNYGQTFWGQGTQVTVSS

SEQ ID NO: 647 - protein, 120 aa, synthetic construct
EVQLVESGGGLVQPGGSLRLSCAASGNIVSSNSMGWHRQAPGKRRELVAGIRSDGFINYADSVKGRFTISSDNVKNTVYLQMNSLRPEDTAVYYCFYQSLSHPNYGHVFWGQGTQVTVSS

SEQ ID NO: 648 - protein, 120 aa, synthetic construct
EVQLVESGGGLVQPGGSLRLSCAASGSIVSTKAMGWHRQAPGKRRELVAGIRSDGFTNYADSVKGRFTISSDSVKDTVYLQMNSLRAEDTAVYYCFYQPLSTPNYGQTFWGQGTQVTVSS

SEQ ID NO: 649 - protein, 120 aa, synthetic construct
EVQLVESGGGLVQPGGSLRLSCAASGSIVSTKAMGWHRQAPGKRRELVAGIRSDGFTNYADSVKGRFTISSDSVKDTVYLQMNSLRAEDTAVYYCFYQSLSTPNYGRTFWGQGTQVTVSS

SEQ ID NO: 650 - protein, 120 aa, synthetic construct
EVQLVESGGGLVQPGGSLRLSCAASGSIVSTNSMGWHRQAPGKRRELVAGIRSDGFINYADSVKGRFTISSDNVKNTVYLQMNSLRPEDTAVYYCFYHSLSTPNYGQVFWGQGTQVTVSS

SEQ ID NO: 651 - protein, 120 aa, synthetic construct
EVQLVESGGGLVQPGGSLRLSCAASGSIVSTRAMGWHRQAPGKRRELVAGLRSDGFTNYADSVKGRFTISSDNVKNTVYLQMNSLRAEDTAVYYCFYQSLSTPNSGQTFWGQGTQVTVSS

SEQ ID NO: 652 - protein, 120 aa, synthetic construct
EVQLVESGGGLVQPGGSLRLSCAASGSIVSTRAMGWHRQAPGKRRELVAGLRSDGFTNYADSVKGRFTISSDNVKNTVYLQMNSLRAEDTAVYYCFYQSLSTPKYGQTFWGQGTQVTVSS

SEQ ID NO: 653 - protein, 120 aa, synthetic construct
EVQLVESGGGLVQPGGSLRLSCAASGSIFSLNGMGWYRQAPGKQRELVAGIRSDGLVNYADSVKGRFTISGDNAKSTVYLQMNSLRPEDTAVYYCYYQSFSSPNYGQTFWGQGTQVTVSS

SEQ ID NO: 654 - protein, 120 aa, synthetic construct
EVQLVESGGGLVQPGGSLRLSCAASGSIVSSRSMGWHRQAPGKRRELVAGIRSDGFINYADSVKGRFTISSDNVKNTVYLQMNSLRPEDTAVYYCFYHSLSTPNYGQVFWGQGTQVTVSS

SEQ ID NO: 655 - protein, 120 aa, synthetic construct
EVQLVESGGGLVQPGGSLRLSCAASGSIVSTKAMGWHRQAPGKRRELVAGIRSDGFTNYADSVKGRFTISSDSVKDTVYLQMNSLRAEDTAVYYCFYQSLGTPNYGQTFWGQGTQVTVSS

SEQ ID NO: 656 - protein, 120 aa, synthetic construct
EVQLVESGGGLVQPGGSLRLSCAASGSIVSTKAMGWHRQAPGKRRELVAGIRSDGFTNYADSVKGRFTISSDSVKDTVYLQMNSLRAEDTAVYYCFDQSLSTPNYGQTFWGQGTQVTVSS

SEQ ID NO: 657 - protein, 120 aa, synthetic construct
EVQLVESGGGLVQPGGSLRLSCAASGSIVSTKAMGWHRQAPGKRRELVAGIRSDGFTNYADSVKGRFTISSDSVKDTVYLQMNSLRAEDTAVYYCFYQSLSTPKYGQTFWGQGTQVTVSS

SEQ ID NO: 658 - protein, 120 aa, synthetic construct
EVQLVESGGGLVQPGGSLRLSCAASGSIVSTNAMGWHRQAPGKGRELVAGFRSDGFTNYADSVKGRFTISSDNVKNTVYLQMNSLRAEDTAVYYCFYQSLSTPNVGQTFWGQGTQVTVSS

SEQ ID NO: 659 - protein, 120 aa, synthetic construct
EVQLVESGGGLVQPGGSLRLSCAASGSIVSTNAMGWHRQAPGKGRELVAGFRSDGFTNYADSVKGRFTISSDNVKNTVYLQMNSLRAEDTAVYYCFYQSLSTPTFGQTFWGQGTQVTVSS

SEQ ID NO: 660 - protein, 120 aa, synthetic construct
EVQLVESGGGLVQPGGSLRLSCAASGSIVSTNSMGWHRQAPGKRREMVAGIRSDGFINYADSVKGRFTISSDNVKNTVYLQMNSLRPEDTAVYYCFYQSLSTPNFGQVFWGQGTQVTVSS

SEQ ID NO: 661 - protein, 120 aa, synthetic construct
EVQLVESGGGLVQPGGSLRLSCAASGSIVSTNSMGWHRQAPGKRRELVAGIRSDGFINYADSVKGRFTISSDNVKNTVYLQMNSLRPEDTAVYYCFYQSLSTPNYGQLFWGQGTQVTVSS

SEQ ID NO: 662 - protein, 120 aa, synthetic construct
EVQLVESGGGLVQPGGSLRLSCAASGSIVSTNSMGWHRQAPGKRRELVAGIRSDGFINYADSVKGRFTISSDNVKNTVYLQMNSLRPEDTAVYYCFYQSLSTPNYGQVFWGQGTQVTVSS

SEQ ID NO: 663 - protein, 120 aa, synthetic construct
EVQLVESGGGLVQPGGSLRLSCAASGSIVSTNSMGWHRQAPGKRRELVAGIRSDGFINYADSVKGRFTISSDNVKNTVYLQMNSLRPEDTAVYYCFYQSLSTHNYGQVFWGQGTQVTVSS

SEQ ID NO: 664 - protein, 120 aa, synthetic construct
EVQLVESGGGLVQPGGSLRLSCAASGSIVSTNSMGWHRQAPGKRRELVAGIRSDGFINYADSVKGRFTISSDNVKNTVYLQMNSLRPEDTAVYYCFYQSLSTSNYGQVFRGQGTQVTVSS

SEQ ID NO: 665 - protein, 120 aa, synthetic construct
EVQLVESGGGLVQPGGSLRLSCAASGSIVSTNSMGWHRQAPGKRRELVAGIRSDGFINYADSVKGRFTISSDNVKNTVYLQMNSLRPEDTAVYYCFYQSLSTPTYGQVFWGQGTQVTVSS

SEQ ID NO: 666 - protein, 120 aa, synthetic construct
EVQLVESGGGLVQPGGSLRLSCAASGSIVSTNSMGWHRQAPGKRRELVAGIRSDGFINYADSVKGRFTISSDNVKNTVYLQMNSLRPEDTAVYYCFYQSLSTPKYGQVFWGQGTQVTVSS

SEQ ID NO: 667 - protein, 120 aa, synthetic construct
EVQLVESGGGLVQPGGSLRLSCAASGSIVSTNSMGWHRQAPGKRRELVAGIRSDGFINYADSVKGRFTISSDNVKNTVYLQMNSLRPEDTAVYYCFYQSLSTPNYGHVFWGQGTQVTVSS

SEQ ID NO: 668 - protein, 120 aa, synthetic construct
EVQLVESGGGLVQPGGSLRLSCAASGSIVSTNSMGWHRQAPGKRRELVAGIRSDGFINYADSVKGRFTISSDNVKNTVYLQMNSLRPEDTAVYYCFYQSLGTPNYGQVFWGQGTQVTVSS

SEQ ID NO: 669 - protein, 120 aa, synthetic construct
EVQLVESGGGLVQPGGSLRLSCAASGSIVSTNSMGWHRQAPGKRRELVAGIRSDGFINYADSVKGRFTISSDNVKNTVYLQMNSLRPEDTAVYYCFSQSLSTPNYGQVFWGQGTQVTVSS

SEQ ID NO: 670 - protein, 120 aa, synthetic construct
EVQLVESGGGLVQPGGSLRLSCAASGSIVSTNSMGWHRQAPGKRRELVAGIRSDGFINYADSVKGRFTISSDNVKNTVYLQMNSLRPEDTAVYYCFDQSLSTPNYGQVFWGQGTQVTVSS

SEQ ID NO: 671 - protein, 120 aa, synthetic construct
EVQLVESGGGLVQPGGSLRLSCAASGSIVSTNSMGWHRQAPGKRRELVAGIRSDGFINYADSVKGRFTISSDNVKNTVYLQMNSLRPEDTAVYYCFYQSHSTPNYGQVFWGQGTQVTVSS

SEQ ID NO: 672 - protein, 120 aa, synthetic construct
EVQLVESGGGLVQPGGSLRLSCAASGSIVSTNSMGWHRQAPGKRRELVAGIRSDGFINYADSVKGRFTISSDNFKNTVYLQMNSLRPEDTAVYYCFYQSLSTPNYGRVFWGQGTQVTVSS

SEQ ID NO: 673 - protein, 120 aa, synthetic construct
EVQLVESGGGLVQPGGSLRLSCAASGSIVSTRAMGWHRQAPGKRRELVAGLRSDGFTNYADSVKGRFTISSDNVKNTVYLQMNSLRAEDTAVYYCFYQSHSTPNYGQTFWGQGTQVTVSS

SEQ ID NO: 674 - protein, 120 aa, synthetic construct
EVQLVESGGGLVQPGGSLRLSCAASGSIVSTRAMGWHRQAPGKRRELVAGLRSDGFTNYADSVKGRFTISSDNVKNTVYLQMNSLRAEDTAVYYCFDQSLSTPNYGQTFWGQGTQVTVSS

SEQ ID NO: 675 - protein, 120 aa, synthetic construct
EVQLVESGGGLVQPGGSLRLSCAASGSIVSSRSMGWHRQAPGKRRELVAGIRSDGFINYADSVKGRFTISSDNVKNTVYLQMNSLRPEDTAVYYCFHQSLSTPNYGQVFWGQGTQVTVSS

SEQ ID NO: 676 - protein, 120 aa, synthetic construct
EVQLVESGGGLVQPGGSLRVSCAASGSIFRADAMGWHRQAPGKPREFVAGIRSDGFTNYADSVKGRFTISWDTVKNTVYLQMNSLRPEDTAVYYCYYQSLSSPNYGQTIWGQGTQVTVSS

SEQ ID NO: 677 - protein, 120 aa, synthetic construct
EVQLVESGGGLVQPGGSLRLSCAASGSIVSTKAMGWHRQAPGKRRELVAGIRSDGFTNYADSVKGRFTISSDSVKDTVYLQMNSLRAEDTAVYYCFYQSLSTPNYGQTFWGQGTQVTVSS

SEQ ID NO: 678 - protein, 120 aa, synthetic construct
EVQLVESGGGLVQPGGSLRLSCAASGSIVSTKAMGWHRQAPGKRRELVAGIRSDGFTNYADSVKGRFTISSDSVKDTVYLQMNSLRAEDTAVYYCFYHSLSTPNYGQTFWGQGTQVTVSS

SEQ ID NO: 679 - protein, 120 aa, synthetic construct
EVQLVESGGGLVQPGGSLRLSCAASGSIVSTKAMGWHRQAPGKRRELVAGIRSDGFTNYADSVKGRFTISSDSVKDTVYLQMNSLRAEDTAVYYCFYQSLSTPNSGQTFWGQGTQVTVSS

SEQ ID NO: 680 - protein, 120 aa, synthetic construct
EVQLVESGGGLVQPGGSLRLSCAASGSIVSTNSMGWHRQAPGKRRELVAGIRSDGFINYADSVKGRFTISSDNVKNTVYLQMNSLRPEDTAVYYCFYQSLSSPNYGQTFWGQGTQVTVSS

SEQ ID NO: 681 - protein, 120 aa, synthetic construct
EVQLVESGGGLVQPGGSLRLSCAASGSIVSTNSMGWHRQAPGKRRELVAGIRSDGFINYADSVKGRFTISSDNVKNTVYLQMNSLRPEDTAVYYCFYQSLSSANYGQVFWGQGTQVTVSS

SEQ ID NO: 682 - protein, 120 aa, synthetic construct
EVQLVESGGGLVQPGGSLRLSCAASGSIVSTNSMGWHRQAPGKRRELVAGIRSDGFINYADSVKGRFTISSDNVKNTVYLQMNSLRPEDTAVYYCFYQSLSTPNYGQVSWGQGTQVTVSS

SEQ ID NO: 683 - protein, 120 aa, synthetic construct
EVQLVESGGGLVQPGGSLRLSCAASGSIVSTNSMGWHRQAPGKRRELVAGIRSDGFINYADSVKGRFTISSDNVKNTVYLQMNSLRPEDTAVYYCFYQSISTPNYGQVFWGQGTQVTVSS

SEQ ID NO: 684 - protein, 120 aa, synthetic construct
EVQLVESGGGLVQPGGSLRLSCAASGSIFSTNAMGWYRQAPGKPRELVAGIHSNGITTYADSVKGRFTISRDNVKNTVYLQMNSLRPEDTAVYYCYYQSLSSTNYGQAFWGQGTQVTVSS

SEQ ID NO: 685 - protein, 120 aa, synthetic construct
EVQLVESGGGLVQPGGSLRLSCAASGSIVSTKAMGWHRQAPGKRRELVAGIRSDGFTNYADSVKGRFTISSDSVKDTVYLQMNSLRAEDTAVYYCFSQSLSTPNYGQTFWGQGTQVTVSS

SEQ ID NO: 686 - protein, 120 aa, synthetic construct
EVQLVESGGGLVQPGGSLRLSCAASGSIVSTNAMGWHRQAPGKGRELVAGFRSDGFTNYADSVKGRFTISSDNVKNTVYLQMNSLRAEDTAVYYCFYQSLSTPKFGQTFWGQGTQVTVSS

SEQ ID NO: 687 - protein, 120 aa, synthetic construct
EVQLVESGGGLVQPGGSLRLSCAASGSIVSTNGMGWHRQAPGKGRELVAGIRSDGFTNYADSVKGRFTISSDNVKNTVYLQMNSLRAEDTAVYYCFYQSLSSPNYGQTFWGQGTQVTVSS

SEQ ID NO: 688 - protein, 120 aa, synthetic construct
EVQLVESGGGLVQPGGSLRLSCAASGSIVSTNGMGWHRQAPGKGRELVAGIRSDGFTNYADSVKGRFTISSDNVKNTVYLQMNSLRAEDTGVYYCSYQALSSPNSGQTFWGQGTQVTVSS

SEQ ID NO: 689 - protein, 120 aa, synthetic construct
EVQLVESGGGLVQPGGSLRLSCAASGSIVSTNGMGWHRQAPGKGRELVAGIRSDGFTNYADSVKGRFTISSDNVKNTVYLQMNSLRAEDTAVYYCFYQSLSSANYGQVFWGQGTQVTVSS

SEQ ID NO: 690 - protein, 120 aa, synthetic construct
EVQLVESGGGLVQPGGSLRLSCAASGSIVSTNSMGWHRQAPGKRRELVAGIRSDGFINYADSVKGRFTISSDNVKNTVYLQMNSLRPEDTAVYYCFYQSLSTHNYGQVFWGQGTRVTVSS

SEQ ID NO: 691 - protein, 120 aa, synthetic construct
EVQLVESGGGLVQPGGSLRLSCAASGSIVSTNSMGWHRQAPGKRRELVAGIRSDGFINYADSVKGRFTISSDNVKNTVYLQMNSLRPEDTAVYYCFYQSLSTPNYGKVFWGQGTQVTVSS

SEQ ID NO: 692 - protein, 120 aa, synthetic construct
EVQLVESGGGLVQPGGSLRLSCAASGSIVSTNSMGWHRQAPGKRRELVAGIRSDGFINYADSVKGRFTISSDNVKNTVYLQMNSLRPEDTAVYYCFYQSLSTPNYGQVYWGQGTQVTVSS

SEQ ID NO: 693 - protein, 120 aa, synthetic construct
EVQLVESGGGLVQPGGSLRLSCAASGSIVSTNSMGWHRQAPGKRRELVAGIRSDGFINYADSVKGRFTISSDNVKNTVYLQMNSLRPEDTAVYYCFYQSLRTPNYGQVFWGQGTQVTVSS

SEQ ID NO: 694 - protein, 120 aa, synthetic construct
EVQLVESGGGLVQPGGSLRLSCAASGSIVSTRAMGWHRQAPGKRRELVAGLRSDGFTNYADSVKGRFTISSDNVKNTVYLQMNSLRAEDTAVYYCFYQSLSSPNYGQTFWGQGTQVTVSS

SEQ ID NO: 695 - protein, 120 aa, synthetic construct
EVQLVESGGGLVQPGGSLRVSCAASGSIFRTDAMGWHRQAPGKQREFVAGIRSDGYTNYADSVKGRFTISRDTVKNTVYLQMNSLRPEDTAVYYCYYQSLSSPNYGQTIWGQGTQVTVSS

SEQ ID NO: 696 - protein, 120 aa, synthetic construct
EVQLVESGGGLVQPGGSLRLSCAASGSIVSSRSMGWHRQAPGKRRELVAGIRSDGFINYADSVKGRFTISSDNVKNTVYLQMNSLRPEDTAVYYCFYQSLSTPNYGQVSWGQGTQVTVSS

SEQ ID NO: 697 - protein, 120 aa, synthetic construct
EVQLVESGGGLVQPGGSLRLSCAASGSIVSSRSMGWHRQAPGKRRELVAGIRSDGFINYADSVKGRFTISSDNVKNTVYLQMNSLRPEDTAVYYCFYQSLSTPNYGKVFWGQGTQVTVSS

SEQ ID NO: 698 - protein, 120 aa, synthetic construct
EVQLVESGGGLVQPGGSLRLSCAASGSIVSTNNMGWHRQAPGKGRELVAGIRSDGFINYADSVKGRFTISSDNVKNTVYLQMNSLRPEDTAVYYCFYQSLSTPNYGHVFWGQGTQVTVSS

SEQ ID NO: 699 - protein, 120 aa, synthetic construct
EVQLVESGGGLVQPGGSLRLSCAASGSIVSTKAMGWHRQAPGKRRELVAGIRSDGFTNYADSVKGRFTISSDSVKDTVYLQMNSLRAEDTAVYYCFYQSLSSPNYGQTFWGQGTQVTVSS

SEQ ID NO: 700 - protein, 120 aa, synthetic construct
EVQLVESGGGLVQPGGSLRLSCAASGSIVSTKAMGWHRQAPGKRRELVAGIRSDGFTNYADSVKGRFTISSDSVKDTVYLQMNSLRAEDTAVYYCFYQSLRTPNYGQTFWGQGTQVTVSS

SEQ ID NO: 701 - protein, 120 aa, synthetic construct
EVQLVESGGGLVQPGGSLRLSCAASGSIVSTKAMGWHRQAPGKRRELVAGIRSDGFTNYADSVKGRFTISSDSVKDTVYLQMNSLRAEDTAVYYCFYQSLSTPNYGHTFWGQGTQVTVSS

SEQ ID NO: 702 - protein, 120 aa, synthetic construct
EVQLVESGGGLVQPGGSLRLSCAASGSIVSTKAMGWHRQAPGKRRELVAGIRSDGFTNYADSVKGRFTISSDSVKGTVYLQMNSLRAEDTAVYYCFYQSLSTPNHGQTFWGQGTQVTVSS

SEQ ID NO: 703 - protein, 120 aa, synthetic construct
EVQLVESGGGLVQPGGSLRLSCAASGSIVSTKAMGWHRQAPGKRRELVAGIRSDGFTNYADSVKGRFTISSDSVKDTVYLQMNSLRAEDTAVYYCFYQSLSTPNYGQTYWGQGTQVTVSS

SEQ ID NO: 704 - protein, 120 aa, synthetic construct
EVQLVESGGGLVQPGGSLRLSCAASGSIVSTKAMGWHRQAPGKRRELVAGIRSDGFTNYADSVKGRFTISSDSVKDTVYLQMNSLRAEDTAVYYCFYQSLSTPTYGQTFWGQGTQVTVSS

SEQ ID NO: 705 - protein, 120 aa, synthetic construct
EVQLVESGGGLVQPGGSLRLSCAASGSIVSTNAMGWHRQAPGKGRELVAGFRSDGFTNYADSVKGRFTISSDNVKNTVYLQMNSLRAEDTAVYYCFYQSLSSPNYGQTFWGQGTQVTVSS

SEQ ID NO: 706 - protein, 120 aa, synthetic construct
EVQLVESGGGLVQPGGSLRLSCAASGSIVSTNAMGWHRQAPGKGRELVAGFRSDGFTNYADSVKGRFTISSDNVKNTVYLQMNSLRAEDTAVYYCFYQSLSTPNSGQTFWGQGTQVTVSS

SEQ ID NO: 707 - protein, 120 aa, synthetic construct
EVQLVESGGGLVQPGGSLRLSCAASGSIVSTNAMGWHRQAPGKGRELVAGFRSDGFTNYADSVKGRFTISSDNVKNTVYLQMNSLRAEDTAVYYCFYQSLSTPIFGQTFWGQGTQVTVSS

SEQ ID NO: 708 - protein, 120 aa, synthetic construct
EVQLVESGGGLVQPGGSLRLSCAASGSIVSTNGMGWHRQAPGKGRELVAGIRSDGFTNYADSVKGRFTISSDSVKDTVYLQMNSLRAEDTAVYYCFYQPLSTPNYGQTFWGQGTQVTVSS

SEQ ID NO: 709 - protein, 120 aa, synthetic construct
EVQLVESGGGLVQPGGSLRLSCAASGSIVSTNGMGWHRQAPGKGRELVAGIRSDGFTNYADSVKGRFTISSDNVKNTVYLQMNSLRAEDTGVYYCDYQALSSPKYGQTFWGQGTQVTVSS

SEQ ID NO: 710 - protein, 120 aa, synthetic construct
EVQLVESGGGLVQPGGSLRLSCAASGSIVSTNSTGWHRQAPGKQRELVAGIRSDGFINYADSVKGRFTISSDNVKNTVYLQMNSLRPEDTAVYYCFYQSLSTPNFGQVFWGQGTQVTVSS

SEQ ID NO: 711 - protein, 120 aa, synthetic construct
EVQLVESGGGLVQPGGSLRLSCAASGSIVSTNSMGWHRQAPGKRRELVAGIRSDGFINYADSVKGRFTISSDNVKNTVYLQMNSLRPEDTAVYYCFYQSLSTPNYGLVFWGQGTQVTVSS

SEQ ID NO: 712 - protein, 120 aa, synthetic construct
EVQLVESGGGLVQPGGSLRLSCAASGSIVSTNSMGWHRQAPGKRRELVAGIRSDGFINYADSVKGRFTISSDNVKNTVYLQMNSLRPEDTAVYYCFYQSLSTPNYGRVFWGQGTQVTVSS

SEQ ID NO: 713 - protein, 120 aa, synthetic construct
EVQLVESGGGLVQPGGSLRLSCAASGSIVSTNSMGWHRQAPGKRRELVAGIRSDGFINYADSVKGRFTISSDNVKNTVYLQMNSLRPEDTAVYYCFYQSLSAPNYGQVFWGQGTQVTVSS

SEQ ID NO: 714 - protein, 120 aa, synthetic construct
EVQLVESGGGLVQPGGSLRLSCAASGSIVSTNSMGWHRQAPGKRRELVAGIRSDGFINYADSVKGRFTISSDNVKNTVYLQMNSLRPEDTAVYYCFYQSLSTPNYVQVFWGQGTQVTVSS

SEQ ID NO: 715 - protein, 120 aa, synthetic construct
EVQLVESGGGLVQPGGSLRLSCAASGSIVSTNSMGWHRQAPGKRRELVAGIRSDGFINYADSVKGRFTISSDNVKNTVYLQMNSLRPEDTAVYYCFYQSLITPNYGQVFWGQGTQVTVSS

SEQ ID NO: 716 - protein, 120 aa, synthetic construct
EVQLVESGGGLVQPGGSLRLSCAASGSIVSTNSMGWHRQAPGKRRELVAGIRSDGFINYADSVKGRFTISSDNVKNTVYLQMNSLRPEDTAVYYCFYQSLSTPNYGQLFLGQGTQVTVSS

SEQ ID NO: 717 - protein, 120 aa, synthetic construct
EVQLVESGGGLVQPGGSLRLSCAASGSIVSTRAMGWHRQAPGKRRELVAGLRSDGFTNYADSVKGRFTISSDNVKNTVYLQMNSLRAEDTAVYYCFYHSLSTPNYGQTFWGQGTQVTVSS

SEQ ID NO: 718 - protein, 120 aa, synthetic construct
EVQLVESGGGLVQPGGSLRLSCAASGSIVSTRAMGWHRQAPGKRRELVAGLRSDGFTNYADSVKGRFTISSDNVKNTVYLQMNSLRAEDTAVYYCFYQSLSTPNYGHTFWGQGTQVTVSS

SEQ ID NO: 719 - protein, 120 aa, synthetic construct
EVQLVESGGGLVQPGGSLRLSCAASGSIVSTRAMGWHRQAPGKRRELVAGLRSDGFTNYADSVKGRFTISSDNVKNTVYLQMNSLRAEDTAVYYCFYQSLRTPNYGQTFWGQGTQVTVSS

SEQ ID NO: 720 - protein, 120 aa, synthetic construct
EVQLVESGGGLVQPGGSLRLSCAASGSIVSTRAMGWHRQAPGKRRELVAGLRSDGFTNYADSVKGRFTISSDNVKNTVYLQMNSLRAEDTAVYYCFSQSLSTPNYGQTFWGQGTQVTVSS

SEQ ID NO: 721 - protein, 120 aa, synthetic construct
EVQLVESGGGLVQPGGSLRLSCAASGSIVSTRAMGWHRQAPGKRRELVAGLRSDGFTNYADSVKGRFTISSDNVKNTVYLQMNSLRAEDTAVYYCFYQSLSTPNDGQTFWGQGTQVTVSS

SEQ ID NO: 722 - protein, 120 aa, synthetic construct
EVQLVESGGGLVQPGGSLRLSCAASGSIVSTNSMGWHRQAPGKRRELVAGIRRDGFINYADSVKGRFTISSDNVKNTVYLQMNSLRPEDTAVYYCFYQSLSTHNYGQVFWGQGTQVTVSS

SEQ ID NO: 723 - protein, 120 aa, synthetic construct
EVQLVESGGGLVQPGGSLRLSCAASGSIVSSRSMGWHRQAPGKRRELVAGIRSDGSINYADSVKGRFTISSDNVKNTVYLQMNSLRPEDTAVYYCFYQSLGTPNYGQVFWGQGTQVTVSS

SEQ ID NO: 724 - protein, 120 aa, synthetic construct
EVQLVESGGGLVQPGGSLRLSCAASGSIFSLNGMGWYRQAPGKQRELVAGIRSDGLVNYADSVKGRFTISGDNAKSTVYLQMNSLRPEDTAVYYCYYQSFSSANYGQVFWGQGTQVTVSS

SEQ ID NO: 725 - protein, 120 aa, synthetic construct
EVQLVESGGGLVQPGGSLRLSCAASGSIFSLNGMGWYRQAPGKQRELVAGIRSNDMANYADSVKGRFTISGDNAKSTVYLQMNSLRPEDTAVYYCYYQSLSSANYGQVFWGQGTQVTVSS

SEQ ID NO: 726 - protein, 120 aa, synthetic construct
EVQLVESGGGLVQPGGSLRLSCAASGSIFSLNGMGWYRQAPGKQRELVAGIRSDGMVNYADSVKGRFTISGDNAKSTVYLQMNSLRPEDTAVYYCYYQSLGSANYGQVFWGQGTQVTVSS

SEQ ID NO: 727 - protein, 120 aa, synthetic construct
EVQLVESGGGLVQPGGSLRLSCAASGSIFSFNGMGWYRQAPGKQRELVAGIRSDGMANYADSVKGRFTISGDNAKSTVYLQMNSLRPEDTAVYYCYYQSYSSANYGHVFWGQGTQVTVSS

SEQ ID NO: 728 - protein, 120 aa, synthetic construct
EVQLVESGGGLVQPGGSLRLSCAASTSIFSANGMGWYRQAPGKQRELVAGVRTDGFLNYADSVKGRFTISRDNAKNTVYLQMNSLRPEDTAVYYCYYQSLGSANYGQVFWGQGTQVTVSS

SEQ ID NO: 729 - protein, 120 aa, synthetic construct
EVQLVESGGGLVQPGGSLRLSCAASGSIFSLNGMGWYRQAPGKQRELVAGIRSDGMVNYADSVKGRFTISGDNAKSTVYLQMNSLRPEDTAVYYCYYQSLSSANYGRVFWGQGTQVTVSS

SEQ ID NO: 730 - protein, 120 aa, synthetic construct
EVQLVESGGGLVQPGGSLRLSCAASGSTFSFNGMGWYRQAPGKQRELVAGIRSDGMANYADSVKGRFTISGDNAKSTVYLQMNSLRPEDTAVYYCYYQSYSSANYGHVFWGQGTQVTVSS

SEQ ID NO: 731 - protein, 120 aa, synthetic construct
EVQLVESGGGLVQPGGSLRLSCAASGSIFSLNGMGWYRQAPGKQRELVAGIRSNDMANYADSVKGRFTISGDNAKSTVYLQMNSLRPEDTAVYYCYYHSLSSANYGQVFWGQGTQVTVSS

SEQ ID NO: 732 - protein, 120 aa, synthetic construct
EVQLVESGGGLVQPGGSLRLSCAASGSIFSGNGMGWYRQAPGKQRELVAGIHSNGITNYADSVKGRFTISRDNVKNTVYLQMNSLRPEDTAVYYCYYQSYSSANYGQAFWGQGTQVTVSS

SEQ ID NO: 733 - protein, 120 aa, synthetic construct
EVQLVESGGGLVQPGGSLRLSCAASGSVFSGNGMGWYRQAPGKQRELVAGIHSNGITNYADSVKGRFTISRDNVKNTVYLQMNSLRPEDTAVYYCYYQSYSSANYGQAFWGQGTQVTVSS

SEQ ID NO: 734 - protein, 120 aa, synthetic construct
EVQLVESGGGLVQPGGSLRLSCAASGSVFSLNGMGWYRQAPGKQRELVAGIRSDGMVNYADSVKGRFTISGDNAKSTVYLQMNSLRPEDTAVYYCYYQSLSSANYGQVSWGQGTQVTVSS

SEQ ID NO: 735 - protein, 120 aa, synthetic construct
EVQLVESGGGLVQPGGSLRLSCAASGSIFSLNGMGWYRQAPGKQRELVAGIRSDGMVNYADSVKGRFTISGDNAKSTVYLQMNSLRPEDTAVYYCYYQSLSSANYGQVFWGQGTQVTVSS

SEQ ID NO: 736 - protein, 120 aa, synthetic construct
EVQLVESGGGLVQPGGSLRLSCAASGSIFSLNGMGWYRQAPGKQRELVAGIRSDGMVNYADSVKGRFTISGDNAKSTVYLQMNSLRPEDTAVYYCYYHSLSSANYGQVFWGQGTQVTVSS

SEQ ID NO: 737 - protein, 120 aa, synthetic construct
EVQLVESGGGLVQPGGSLRLSCAASGSIFSLNGMGWYRQAPGKQRELVAGIRSDGMVNYADSVKGRFTISGDNAKSTVYLQMNSLRPEDTAVYYCYYQSLSSASYGQVFWGQGTQVTVSS

SEQ ID NO: 738 - protein, 120 aa, synthetic construct
EVQLVESGGGLVQPGGSLRLSCAASGSIFSLNGMGWYRQAPGKQRELVAGIRSDGLVNYADSVKGRFTISGDNAKSTVYLQMNSLRPEDTAVYYCYYQSYSSANYGQVLWGQGTQVTVSS

SEQ ID NO: 739 - protein, 120 aa, synthetic construct
EVQLVESGGGLVQPGGSLRLSCAASGSIFSFNGMGWYRQAPGKQRELVAGIRSDGMANYADSVKGRFTISGDNAKSTVYLQMNSLRPEDTAVYYCYYQSYSSASYGHVFWGQGTQVTVSS

SEQ ID NO: 740 - protein, 120 aa, synthetic construct
EVQLVESGGGLVQPGGSLRLSCAASGSILSGNGMGWYRQAPGKQRELVAGIHSNGITNYADSVKGRFTISRDNVKNTVYLQMNSLRPEDTAVYYCYYQSYSSANYGQAFWGQGTQVTVSS

SEQ ID NO: 741 - protein, 120 aa, synthetic construct
EVQLVESGGGLVQPGGSLRLSCAASGSIFSLNGMGWYRQAPGKQRELVAGIRSDGMVNYADSVKGRFTISGDNAKSTVYLQMNSLRPEDTAVYYCYDQSLSSANYGQVFWGQGTQVTVSS

SEQ ID NO: 742 - protein, 120 aa, synthetic construct
EVQLVESGGGLVQPGGSLRLSCAASGSIFSLNGMGWYRQAPGKQRELVAGIRSDGMVNYADSVKGRFTISGDNAKSTVYLQMNSLRPEDTAVYYCYYQSLSSAKYGQVFWGQGTQVTVSS

SEQ ID NO: 743 - protein, 120 aa, synthetic construct
EVQLVESGGGLVQPGGSLRLSCAASGSIFSLNGMGWYRQAPGKQRELVAGIRSDGMVNYADSVKGRFTISGDNAKSTVYLQMNSLRPEDTAVYYCYYQSLSSATYGQVFWGQGTQVTVSS

SEQ ID NO: 744 - protein, 120 aa, synthetic construct
EVQLVESGGGLVQPGGSLRLSCAASGSIFSLNGMGWYRQAPGKQRELVAGIRSDGMVNYADSVKGRFTISGDNAKSTVYLQMNSLRPEDTAVYYCYYQSLRSANYGQVFWGQGTQVTVSS

SEQ ID NO: 745 - protein, 120 aa, synthetic construct
EVQLVESGGGLVQPGGSLRLSCAASGSIFSLNGMGWYRQAPGKQRELVAGIRSDGLVNYADSVKGRFTISGDNAKSTVYLQMNSLRPEDTAVYYCYYQSLSSANYGRVFWGQGTQVTVSS

SEQ ID NO: 746 - protein, 120 aa, synthetic construct
EVQLVESGGGLVQPGGSLRLSCAASGSIFSLNGMGWYRQAPGKQRELVAGIRSDGMVNYADSVKGRFTISGDNAKSTVYLQMNSLRPEDTAVYYCYYQSLSSANYGKVFWGQGTQVTVSS

SEQ ID NO: 747 - protein, 120 aa, synthetic construct
EVQLVESGGGLVQPGGSLRLSCAASGSIFSLNAMGWYRQAPGKQRELVAGIRSNGMANYADSVKGRFTISGDNAKSTVYLQMNSLRPEDTAVYYCYYQSFSSDNYGHVFWGQGTQVTVSS

SEQ ID NO: 748 - protein, 120 aa, synthetic construct
EVQLVESGGGLVQPGGSLRLSCAASGVTFNINAMGWYRQAPGKERELVAGIRSDGMANYADSVKGRYTISGDNAKSTVYLQMNSLRPEDTAVYYCYYQSYSSANYGHVFWGQGTQVTVSS

SEQ ID NO: 749 - protein, 120 aa, synthetic construct
EVQLVESGGGLVQPGGSLRLSCAASGSIFSLNGMGWYRQAPGKQRELVAGIRSNDMANYADSVKGRFTISGDNAKSTVYLQMNSLRPEDTAVYYCYDQSLSSANYGQVFWGQGTQVTVSS

SEQ ID NO: 750 - protein, 120 aa, synthetic construct
EVQLVESGGGLVQPGGSLRLSCAASGSIFSLNGMGWYRQAPGKQRELVAGIRSNDMANYADSVKGRFTISGDNAKSTVYLQMNSLRPEDTAVYYCYYQSLRSANYGQVFWGQGTQVTVSS

SEQ ID NO: 751 - protein, 120 aa, synthetic construct
EVQLVESGGGLVQPGGSLRLSCAASGSIFSLNGMGWYRQAPGKQRELVAGIRSDGMANYADSVKGRFTISGDNAKSTVYLQMNSLRPEDTAVYYCYHQSLSSANYGQVFWGQGTQVTVSS

SEQ ID NO: 752 - protein, 120 aa, synthetic construct
EVQLVESGGGLVQPGGSLRLSCAASGSIVSTNGMGWHRQAPGKGRELVAGIRSDGFTNYADSVKGRFTISSDNVKNTVYLQMNSLRAEDTAVYYCYYQSLTTPNFGQVFWGQGTQVTVSS

SEQ ID NO: 753 - protein, 120 aa, synthetic construct
EVQLVESGGGLVQPGGSLRLSCAASGFRFGDYAMGWHRQAPGKRRELVAGIRSDGFTNYADSVKGRFTISSEDVKNTVYLQMNSLRAEDTAVYYCYYQSLTTPNYGQLFWGQGTQVTVSS

SEQ ID NO: 754 - protein, 120 aa, synthetic construct
EVQLVESGGGLVQPGGSLRLSCAASGSIVSTNGMGWHRQAPGKGRELVAGIRSDGFTNYADSVKGRFTISSDNVKDTVYLQMNSLRAEDTAVYYCYYQSLTTPNFGQVFWGQGTQVTVSS

SEQ ID NO: 755 - protein, 120 aa, synthetic construct
EVQLVESGGGLVQPGGSLRLSCAASGSIVSTSAMGWHRQAPGKRRELVAGIRSDGFTNYADSVKGRFTISHDNVKNTAYLQMNSLRAEDTAVYYCFYQSLSTPNFGQTFWGQGTQVTVSS

SEQ ID NO: 756 - protein, 120 aa, synthetic construct
EVQLVESGGGLVQPGGSLRLSCAASGSIVSTNAMGWHRQAPGKGRELVAGFRSDGFTNYADSVKGRFTISSDNVKNTVYLQMNSLRAEDTAVYYCFYQSLSTPNFGQTFWGQGTQVTVSS

SEQ ID NO: 757 - protein, 120 aa, synthetic construct
EVQLVESGGGLVQPGGSLRLSCAASGSIVSTNGMGWHRQAPGKGRELVAGIRSDGFTNYADSVKGRFTISSDNVKNTVYLQMNSLRAEDTAVYYCFYQSLSTPNFGQTIWGQGTQVTVSS

SEQ ID NO: 758 - protein, 120 aa, synthetic construct
EVQLVESGGGLVQPGGSLRLSCAASGSIVSTSAMGWHRQAPGKRRELVAGIRSDGFTNYADSVKGRFTISHDNVKNTAYLQMNSLRAEDTAVYYCFYQSLSTPNFGKTFWGQGTQVTVSS

SEQ ID NO: 759 - protein, 120 aa, synthetic construct
EVQLVESGGGLVQPGGSLRLSCAASGSIVSTNAMGWHRQAPGKGRELVAGFRSDGFTNYADSVKGRFTISSDNAKNTVYLQMNSLRAEDTAVYYCFYQSLSTPNFGLTFWGQGTQVTVSS

SEQ ID NO: 760 - protein, 120 aa, synthetic construct
EVQLVESGGGLVQPGGSLRLSCAASGSIVSTNAMGWHRQAPGKLRELVAGIRSDGFTNYADSVKGRFTISSDDVKNTVYLQMNSLRAEDTAVYYCFYQSLTTPNFGQVFWGQGTQVTVSS

SEQ ID NO: 761 - protein, 120 aa, synthetic construct
EVQLVESGGGLVQPGGSLRLSCAASGSIVSTNAMGWHRQAPGKRRELVAGIRSDGFTNYADSVKGRFTISSDNVKNTVYLQMNSLRPEDTAVYYCFYQSLTAPNFGQVFMGQGTQVTVSS

SEQ ID NO: 762 - protein, 120 aa, synthetic construct
EVQLVESGGGLVQPGGSLRLSCAASGSIVSTNAMGWHRQAPGKGRELVAGFRSDGFTNYADSVKGRFTISSDNVKNTVYLQMNSLRAEDTAVYYCFYQSLSTPNFGHTFWGQGTQVTVSS

SEQ ID NO: 763 - protein, 120 aa, synthetic construct
EVQLVESGGGLVQPGGSQRLSCAASGSIVSTNAMGWHRQAPGKRRELVAGIRSDGFTNYADSVKGRFTISSDNVKNTVYLQMNSLRPEDTAVYYCFYQSLTAPNFGQVFMGQGTQVTVSS

SEQ ID NO: 764 - protein, 120 aa, synthetic construct
EVQLVESGGGLVQPGGSLRLSCAASGSIVSTNGMGWHRQAPGKGRELVAGIRSDGFTNYADSVKGRFTISSDNVKNTVYLQMNSLRPEDTAVYYCFYQSLTAPNFGQVFMGQGTQVTVSS

SEQ ID NO: 765 - protein, 120 aa, synthetic construct
EVQLVESGGGLVQPGGSLRLSCAASGSIVSTNGMGWHRQAPGKGRELVAGIRSDGFTNYADSVKGRFTISSDNVKNTVYLQMNSLRAEDTGVYYCYYQSLSTPNFGQTFWGQGTQVTVSS

SEQ ID NO: 766 - protein, 120 aa, synthetic construct
EVQLVESGGGLVQPGGSLRLSCAASGSIVSTNSMGWHRQAPGKRREMVAGIRSDGFINYADSVKGRFTISSDNVKNTVYLQMNSLRPEDTAVYYCFYHSLSTPNFGQLFWGQGTQVTVSS

SEQ ID NO: 767 - protein, 120 aa, synthetic construct
EVQLVESGGGLVQPGGSLRLSCAASGSIVGTNAMGWHRQAPGKGRELVAGFRSDGFTNYADSVKGRFTISSDNVKNTVYLQMNSLRAEDTAVYYCFYQSLSTPNFGRTFWGQGTQVTVSS

SEQ ID NO: 768 - protein, 120 aa, synthetic construct
EVQLVESGGGLVQPGGSLRLSCAASGSIVSTNNMGWHRQAPGKGRELVAGIRSDGFINYADSVKGRFTISSDNVKNTVYLQMNSLRPEDTAVYYCFYQSLSTPNFGQLSLGQGTQVTVSS

SEQ ID NO: 769 - protein, 120 aa, synthetic construct
EVQLVESGGGLVQPGGSLRLSCAASGSIVSTNAMGWHRQAPGKGRELVAGFRSDGFTNYADSVKGRFTISSDNVKNTVYLQMNSLRAEDTAVYYCFYQPLSTPNFGQTFWGQGTQVTVSS

SEQ ID NO: 770 - protein, 120 aa, synthetic construct
EVQLVESGGGLVQPGGSLRLSCAASGSIVSTNAMGWHRQAPGKGRELVAGFRSDGFTNYADSVKGRFTISSDNVKNTVYLQMNSLRAEDTAVYYCFYHSLSTPNFGQTFWGQGTQVTVSS

SEQ ID NO: 771 - protein, 120 aa, synthetic construct
EVQLVESGGGLVQPGGSLRLSCAASGSIVSTNAMGWHRQAPGKGRELVAGFRSDGFTNYADSVKGRFTISSDNVKNTVYLQMNSLRAEDTAVYYCFYQSLRTPNFGQTFWGQGTQVTVSS

SEQ ID NO: 772 - protein, 120 aa, synthetic construct
EVQLVESGGGLVQPGGSLRLSCAASGSIVSTNAMGWHRQAPGKGRELVAGFRSDGFTNYADSVKGRFTISSDNVKNTVYLQMNSLRAEDTAVYYCFSQSLSTPNFGQTFWGQGTQVTVSS

SEQ ID NO: 773 - protein, 120 aa, synthetic construct
EVQLVESGGGLVQPGGSLRLSCAASGSIVSTNAMGWHRQAPGKGRELVAGFRSDGFTNYADSVKGRFTISSDNVKNTVYLQMNSLRAEDTAVYYCSYQSLSTPNFGQTFWGQGTQVTVSS

SEQ ID NO: 774 - protein, 120 aa, synthetic construct
EVQLVESGGGLVQPGGSLRLSCAASGSIVSTNSMGWHRQAPGKRREMVAGIRSDGFINYADSVKGRFTISSDNVKNTVYLQMNSLRPEDTAVYYCFYQSLSTPNFGQLVWGQGTQVTVSS

SEQ ID NO: 775 - protein, 120 aa, synthetic construct
EVQLVESGGGLVQPGGSLRLSCAASGSIVSTNNMGWHRQAPGKGRELVAGIRSDGFINYADSVKGRFTISSDNVKNTVYLQMNSLRPEDTAVYYCFYHSLSTPNFGQLFLGQGTQVTVSS

SEQ ID NO: 776 - protein, 120 aa, synthetic construct
EVQLVESGGGLVQPGGSLRLSCAASGSIVSTNAMGWHRQAPGKLRELVAGIRSDGFTNYADSVKGRFTISSDDVKNTVYLQMNSLRAEDTAVYYCFYQSLTTPNFGQLFWGQGTQVTVSS

SEQ ID NO: 777 - protein, 120 aa, synthetic construct
EVQLVESGGGLVQPGGSLRLSCAASGSIVSTNAMGWHRQAPGKGRELVAGFRSDGFTNYADSVKGRFTISSDNVKNTVYLQMNSLRAEDTAVYYCFDQSLSTPNFGQTFWGQGTQVTVSS

SEQ ID NO: 778 - protein, 120 aa, synthetic construct
EVQLVESGGGLVQPGGSLRLSCAASGSIVSTNAMGWHRQAPGKGRELVAGFRSDGFTNYADSVKGRFTISSDNVKNTVYLQMNSLRAEDTAVYYCFYQSHSTPNFGQTFWGQGTQVTVSS

SEQ ID NO: 779 - protein, 120 aa, synthetic construct
EVQLVESGGGLVQPGGSLRLSCAASGSIVSTNAMGWHRQAPGKGRELVAGFRSDGFTNYADSVKGRFTISSDNVKNTVYLQMNSLRAEDTAVYYCFYQSISTPNFGQTFWGQGTQVTVSS

SEQ ID NO: 780 - protein, 120 aa, synthetic construct
EVQLVESGGGLVQPGGSLRLSCAASGSIVSTNAMGWHRQAPGKGRELVAGFRSDGFTNYADSVKGRFTISSDNVKNTVYLQMNSLRAEDTAVYYCLYQSLSTPNFGQTFWGQGTQVTVSS

SEQ ID NO: 781 - protein, 120 aa, synthetic construct
EVQLVESGGGLVQPGGSLRLSCAASGSIVSTNAMGWHRQAPGKGRELVAGFRSDGFTNYADSVKGRFTISSDNVKNTVYLQMNSLRAEDTAVYYCFYQSLSTHNFGQTFWGQGTQVTVSS

SEQ ID NO: 782 - protein, 120 aa, synthetic construct
EVQLVESGGGLVQPGGSLRLSCAASGSIVSTNSMGWHRQAPGKRREMVAGIRSDGFINYADSVKGRFTISSDNVKNTVYLQMNSLRPEDTAVYYCFYQSLSAPNFGQLFWGQGTQVTVSS

SEQ ID NO: 783 - protein, 120 aa, synthetic construct
EVQLVESGGGLVQPGGSLRLSCAASGSIVSTNSMGWHRQAPGKRREMVAGIRSDGFINYADSVKGRFTISSDNVKNTVYLQMNSLRPEDTAVYYCFYQSLSTPNFGHLFWGQGTQVTVSS

SEQ ID NO: 784 - protein, 120 aa, synthetic construct
EVQLVESGGGLVQPGGSLRLSCAASGSIVSTNNMGWHRQAPGKGRELVAGIRSDGFINYADSVKGRFTISSDNVKNTVYLQMNSLRPEDTAVYYCSYQSLSTPNFGQLFLGQGTQVTVSS

SEQ ID NO: 785 - protein, 120 aa, synthetic construct
EVQLVESGGGLVQPGGSLRLSCAASGSIVSTNAMGWHRQAPGKLRELVAGIRSDGFTNYADSVKGRFTISSDDVKNTVYLQMNSLRAEDTAVYYCFYHSLTTPNFGQVFWGQGTQVTVSS

SEQ ID NO: 786 - protein, 120 aa, synthetic construct
EVQLVESGGGLVQPGGSLRLSCAASGSIVSTNAMGWHRQAPGKRRELVAGIRSDGFTNYADSVKGRFTISSEDVKNTVYLQMNSLRAEDTAVYYCYYQSLTTPNYGQLFWGQGTQVTVSS

SEQ ID NO: 787 - protein, 120 aa, synthetic construct
EVQLVESGGGLVQPGGSLRLSCAASGSIVSTNAMGWHRQAPGKGRELVAGFRSDGFTNYADSVKGRFTISSDNVKNTVYLQMNSLRAEDTAVYYCFYQSLSTPNFDQTFWGQGTQVTVSS

SEQ ID NO: 788 - protein, 120 aa, synthetic construct
EVQLVESGGGLVQPGGSLRLSCAASGSIVSTNAMGWHRQAPGKGRELVAGFRSDGFTNYADSVKGRFTISSDNVKNTVYLQMNSLRAEDTAVYYCIYQSLSTPNFGQTFWGQGTQVTVSS

SEQ ID NO: 789 - protein, 120 aa, synthetic construct
EVQLVESGGGLVQPGGSLRLSCAASGSIVSTNGMGWHRQAPGKGRELVAGIRSDGFTNYADSVKGRFTISSDNVKNTVYLQMNSLRAEDTGVYYCYYQSLSTPNFGQLFWGQGTQVTVSS

SEQ ID NO: 790 - protein, 120 aa, synthetic construct
EVQLVESGGGLVQPGGSLRLSCAASGSIVGTNAMGWHRQAPGKLRELVAGIRSDGFTNYADSVKGRFTISSDDVKNTVYLQMNSLRAEDTAVYYCFYQSLTTPNFGQLFWGQGTQVTVSS

SEQ ID NO: 791 - protein, 120 aa, synthetic construct
EVQLVESGGGLVQPGGSLRLSCAASGSIVSTNAMGWHRQAPGKLRELVAGIRSDGFANYADSVKGRFTISSDDVKNTVYLQMNSLRAEDTAVYYCFYQSLTTPNFGQLFWGQGTQVTVSS

SEQ ID NO: 792 - protein, 120 aa, synthetic construct
EVQLVESGGGLVQPGGSLRLSCAASGSIVSTNAMGWHRQAPGKGRELVAGFRSDGFTNYADSVKGRFTISSDNVKNTVYLQMNSLRAEDTAVYYCFYKSLSTPNFGQTFWGQGTQVTVSS

SEQ ID NO: 793 - protein, 120 aa, synthetic construct
EVQLVESGGGLVQPGGSLRLSCAASGSIVSTNGMGWHRQAPGKGRELVAGIRSDGFTSYADSVKGRFTISSDNVKNTVYLQMNSLRAEDTAVYYCYYQSLTTPNFGQVFWGQGTQVTVSS

SEQ ID NO: 794 - protein, 120 aa, synthetic construct
EVQLVESGGGLVQPGGSLRLSCAASGSIVSTNGMGWHRQAPGKGRELVAGIRSDGFTNYADSVKGRFTISSDNVKNTVYLQMNSLRAEDTAVYYCYHQSLTTPNFGQVFWGQGTQVTVSS

SEQ ID NO: 795 - protein, 120 aa, synthetic construct
EVQLVESGGGLVQPGGSLRLSCAASGSIVSTNSMGWHRQAPGKRREMVAGIRSDGFINYADSVKGRLTISSDNVKNTVYLQMNSLRPEDTAVYYCFYQSLGTPNFGQLFWGQGTQVTVSS

SEQ ID NO: 796 - protein, 120 aa, synthetic construct
EVQLVESGGGLVQPGGSLRLSCAASGSIVSTNSMGWHRQAPGKRREMVAGIRSDGFINYADSVKGRFTISSDNVKNTVYLQMNSLRPEDTAVYYCFYQPLSTPNFGQLFWGQGTQVTVSS

SEQ ID NO: 797 - protein, 120 aa, synthetic construct
EVQLVESGGGLVQPGGSLRLSCAASGSIVSTNSMGWHRQAPGKRREMVAGIRSDGFINYADSVKGRFTISSDNVKNTVYLQMNSLRPEDTAVYYCFYQSLSTPNFGLLFWGQGTQVTVSS

SEQ ID NO: 798 - protein, 120 aa, synthetic construct
EVQLVESGGGLVQPGGSLRLSCAASGSIFSLNGMGWYRQAPGKQRELVAGIRSDGLVNYADSVKGRFTISGDNAKSTVYLQMNSLRPEDTAVYYCYYQSLSTPNFGQTFWGQGTQVTVSS

SEQ ID NO: 799 - protein, 120 aa, synthetic construct
EVQLVESGGGLVQPGGSLRLSCAASGSIFSFNGMGWYRQAPGKTRELVAGIRSDGMANYADSVKGRFTISGDNAKSTVYLQMNSLRPEDTAVYYCYYQSLSSANFGQLFWGQGTQVTVSS

SEQ ID NO: 800 - protein, 120 aa, synthetic construct
EVQLVESGGGLVQPGGSLRLSCAASGSISSFNGMGWYRQAPGKQRELVAGIRSDGMENYADSVKGRFTISGDNAKSTVYLQMNSLRPEDTAVYYCYYQSLSSANFGQLFWGQGTQVTVSS

SEQ ID NO: 801 - protein, 120 aa, synthetic construct
EVQLVESGGGLVQPGGSLRLSCAASGSIFSLNGMGWYRQAPGKQRELVAGIRSDGLVNYADSVKGRFTISGDNAKSTVYLQMNSLRPEDTAVYYCYYQSFSSANFGQTIWGQGTQVTVSS

SEQ ID NO: 802 - protein, 120 aa, synthetic construct
EVQLVESGGGLVQPGGSLRLSCAASGSISSFNGMGWYRQAPGKQRELVAGIRSDGMENYADSVKGGFTISGDNAKSTVYLQMNSLRPEDTAVYYCYYQSLGSANFGQLFWGQGTQVTVSS

SEQ ID NO: 803 - protein, 120 aa, synthetic construct
EVQLVESGGGLVQPGGSLRLSCAASGSIRNINGMGWYRQAPGKQRELVAGIRSNSEPNYADSVKGRFTISRDNAKNTVYLQMNSLRPEDTAVYYCYYQSLSSVNWGQVFWGQGTQVTVSS

SEQ ID NO: 804 - protein, 120 aa, synthetic construct
EVQLVESGGGLVQPGGSLRLSCAASGSIFSFNAMGWYRQAPGKQRELVAGIRSNGMANYADSVKGRFTISGDNAKSTVYLQMNSLRPEDTAVYYCYYQSLGSANYGQLFWGQGTQVTVSS

SEQ ID NO: 805 - protein, 120 aa, synthetic construct
EVQLVESGGGLVQPGGSLRLSCAASGSIFSFNAMGWYRQAPGKQRELVAGIRSNGMANYADSVKGRFTISGDNAKSTVYLQMNSLRPEDTAVYYCYYHSLSSANYGQLFWGQGTQVTVSS

SEQ ID NO: 806 - protein, 120 aa, synthetic construct
EVQLVESGGGLVQPGGSLRLSCAASGSIFSFNAMGWYRQAPGKQRELVAGIRSNGMANYADSVKGRFTISGDNAKSTVYLQMNSLRPEDTAVYYCYYQSLSGANYGQLFWGQGTQVTVSS

SEQ ID NO: 807 - protein, 120 aa, synthetic construct
EVQLVESGGGLVQPGGSLRLSCAASGSIVSTNGMGWHRQAPGKGRELVAGIRSDGFTNYADSVKGRFTISSDNVKNTVYLQMNSLRAEDTGVYYCYYQALSSANYGQLFWGQGTQVTVSS

SEQ ID NO: 808 - protein, 120 aa, synthetic construct
EVQLVESGGGLVQPGGSLRLSCAASGSIVSTNSMGWHRQAPGKRRELVAGIRSDGFINYADSVKGRFTISSDNVKNTVYLQMNSLRPEDTAVYYCFYQSLSSANYGQLFWGQGTQVTVSS

SEQ ID NO: 809 - protein, 120 aa, synthetic construct
EVQLVESGGGLVQPGGSLRLSCAASGSIFSFNAMGWYRQAPGKQRELVAGIRSNGMANYADSVKGRFTISGDNAKSTVYLQMNSLRPEDTAVYYCYDQSLSSANYGQLFWGQGTQVTVSS

SEQ ID NO: 810 - protein, 120 aa, synthetic construct
EVQLVESGGGLVQPGGSLRVSCAASGSIFRADAMGWHRQAPGKPREFVAGIRSDGFTNYADSVKGRFTISWDTVKNTVYLQMNSLRPEDTAVYYCYYQSLSSPNFGQTFWGQGTQVTVSS

SEQ ID NO: 811 - protein, 120 aa, synthetic construct
EVQLVESGGGLVQPGGSLRVSCAASGSIFRADAMGWHRQAPGKPREFVAGIRSDGFTNYADSVKGRFTISWDTVKNTVYLQMNSLRPEDTAVYYCYYQSLSSPNFGQTIWGQGTQVTVSS

SEQ ID NO: 812 - protein, 120 aa, synthetic construct
EVQLVESGGGLVQPGGSLRLSCAASGSIFSLNGMGWYRQAPGKQRELVAGIRSDGLVNYADSVKGRFTISGDNAKSTVYLQMNSLRPEDTAVYYCYYQSFSSANFGQTFWGQGTQVTVSS

SEQ ID NO: 813 - protein, 120 aa, synthetic construct
EVQLVESGGGLVQPGGSLRLSCAASGSIFSFNAMGWYRQAPGKQRELVAGIRSNGMANYADSVKGRFTISGDNAKSTVYLQMNSLRPEDTAVYYCYYQSLSSANYGQLFWGQGTQVTVSS

SEQ ID NO: 814 - protein, 120 aa, synthetic construct
EVQLVESGGGLVQPGGSLRLSCAASGSIFSGNAMGWYRQAPGKQRELVAGIHSNGITNYADSVKGRFTISRDNVKNTVYLQMNSLRPEDTAVYYCYYQSLSSANYGQTFWGQGTQVTVSS

SEQ ID NO: 815 - protein, 120 aa, synthetic construct
EVQLVESGGGLVQPGGSLRLSCAASGSIRNINGMGWYRQAPGKQRELVAGIRSNSIANYADSVKGRFTISRDNAKNTVYLQMNSLRPEDTAVYYCYYQSLSSVNWGQVFWGQGTQVTVSS

SEQ ID NO: 816 - protein, 120 aa, synthetic construct
EVQLVESGGGLVQPGGSLRVSCAASGSIFRTDAMGWHRQAPGKQREFVAGIRSDGYTNYADSVKGRFTISRDTVKNTVYLQMNSLRPEDTAVYYCYYQSLSSPNFGQTFWGQGTQVTVSS

SEQ ID NO: 817 - protein, 120 aa, synthetic construct
EVQLVESGGGLVQPGGSLRLSCAASGSIVSTNGMGWHRQAPGKGRELVAGIRSDGFTNYADSVKGRFTISSDNVKNTVYLQMNSLRAEDTGVYYCYYQALSSPNFGQLFWGQGTQVTVSS

SEQ ID NO: 818 - protein, 120 aa, synthetic construct
EVQLVESGGGLVQPGGSQRLSCAASGSIFSFNGMGWYRQAPGKQRELVAGIRSNGLANYADSVKGRFTISRDNAKNTVYLQMNSLRPEDTAVYYCYYQSFNSANYGQLFWGQGTQVTVSS

SEQ ID NO: 819 - protein, 120 aa, synthetic construct
EVQLVESGGGLVQPGGSLRLSCAASGSINSSNGMGWYRQAPGKQRELVAGIRSDGMANYADSVKGRFTISGDNAKSTVYLQMNSLRPEDTAVYYCYYQSLSSANFGQLFWGQGTQVTVSS

SEQ ID NO: 820 - protein, 120 aa, synthetic construct
EVQLVESGGGLVQPGGSLRLSCAASGSIFSFNAMGWYRQAPGKQRELVAGIRSNGMANYADSVKGRFTISGDNAKSTVYLQMNSLRPEDTAVYYCYYQSLRSANYGQLFWGQGTQVTVSS

SEQ ID NO: 821 - protein, 120 aa, synthetic construct
EVQLVESGGGLVQPGGSLRLSCAASGSIFSFNAMGWYRQAPGKQRELVAGIRSNGMANYADSVKGRFTISGDNAKSTVYLQMNSLRPEDTAVYYCYYQSLSSADYGQLFWGQGTQVTVSS

SEQ ID NO: 822 - protein, 120 aa, synthetic construct
EVQLVESGGGLVQPGGSLRLSCAASGSIFSFNAMGWYRQAPGKQRELVAGIRSNGMANYADSVKGRFTISGDNAKSTVYLQMNSLRPEDTAVYYCYYQSLSSASYGQLFWGQGTQVTVSS

SEQ ID NO: 823 - protein, 120 aa, synthetic construct
EVQLVESGGGLVQPGGSLRLSCAASGSIFSFNAMGWYRQAPGKQRELVAGIRSNGMANYADSVKGRFTISGDNAKSTVYLQMNSLRPEDTAVYYCYSQSLSSANYGQLFWGQGTQVTVSS

SEQ ID NO: 824 - protein, 120 aa, synthetic construct
EVQLVESGGGLVQPGGSLRLSCAASGGIFSGNAMGWYRQAPGKQRELVAGIHSNGITNYADSVKGRFTISRDNVKNTVYLQMNSLRPEDTAVYYCYYQSLSSANYGQTFWGQGTQVTVSS

SEQ ID NO: 825 - protein, 120 aa, synthetic construct
EVQLVESGGGLVQPGGSLRLSCAASGSIFSANGMGWYRQAPGKQRELVAGIRTNEIANYADSVKGRFTISRDNAKNTVYLQMNSLRPEDTAVYYCYYQSLSSANYGQLFWGQGTQVTVSS

SEQ ID NO: 826 - protein, 120 aa, synthetic construct
EVQLVESGGGLVQPGGSLRLSCAASGSIVSTNGMGWHRQAPGKGRELVAGIRSDGFTNYADSVKGRFTISSDNVKNTVYLQMNSLRAEDTGVYYCYYQALSTPNYGQVFWGQGTQVTVSS

SEQ ID NO: 827 - protein, 120 aa, synthetic construct
EVQLVESGGGLVQPGGSLRLSCAASGSIVSTNGMGWHRQAPGKGRELVAGIRSDGFTNYADSVKGRFTISSDNVKNTVYLQMNSLRAEDTGVYYCYYQALSTPNFGQTFWGQGTQVTVSS

SEQ ID NO: 828 - protein, 120 aa, synthetic construct
EVQLVESGGGLVQPGGSLRLSCAASGSIVSTNGMGWHRQAPGKGRELVAGIRSDGFTNYADSVKGRFTISSDNVKNTVYLQMNSLRAEDTGVYYCYYQALSTPNYGQTIWGQGTQVTVSS

SEQ ID NO: 829 - protein, 120 aa, synthetic construct
EVQLVESGGGLVQPGGSLRLSCAASGSIVSTNGMGWHRQAPGKGRELVAGIRSDGFTNYADSVKGRFTISSDNVKNTVYLQMNSLRAEDTGVYYCYYQALSTPNFGQTIWGQGTQVTVSS

SEQ ID NO: 830 - protein, 120 aa, synthetic construct
EVQLVESGGGLVQPGGSLRLSCAASGSIVSTNGMGWHRQAPGKGRELVAGIRSDGFTNYADSVKGRFTISSDNVKNTVYLQMNSLRAEDTGVYYCYYQALSSPNYGHVFWGQGTQVTVSS

SEQ ID NO: 831 - protein, 120 aa, synthetic construct
EVQLVESGGGLVQPGGSLRLSCAASGSIVSTNGMGWHRQAPGKGRELVAGIRSDGFTNYADSVKGRFTISSDNVKNTVYLQMNSLRAEDTGVYYCYYQALGSPNYGQVFWGQGTQVTVSS

SEQ ID NO: 832 - protein, 120 aa, synthetic construct
EVQLVESGGGLVQPGGSLRLSCAASGSIVSTNGMGWHRQAPGKGRELVAGIRSDGFTNYADSVKGRFTISSDNVKNTVYLQMNSLRAEDTGVYYCYYQALSSPNFGQVFWGQGTQVTVSS

SEQ ID NO: 833 - protein, 120 aa, synthetic construct
EVQLVESGGGLVQPGGSLRLSCAASGSIVSTNGMGWHRQAPGKGRELVAGIRSDGFTNYADSVKGRFTISSDNVKNTVYLQMNSLRAEDTGVYYCYDQALSTPNSGQVFWGQGTQVTVSS

SEQ ID NO: 834 - protein, 120 aa, synthetic construct
EVQLVESGGGLVQPGGSLRLSCAASGRRFSSNAMGWHRQAPGKQRELVAGIRSDGYTNYADSVKGRFTISSDNVKNTVYLQMNSLRPEDTAVYYCYYQSLSTPNYGQVSWGQGTQVTVSS

SEQ ID NO: 835 - protein, 120 aa, synthetic construct
EVQLVESGGGLVQPGGSLRLSCAASGRRFSSNAMGWHRQAPGKQRELVAGIRSDGYTNYADSVKGRFTISSDNVKNTVYLQMNSLRPEDTAVYYCYYQSLSTPNYGQVLWGQGTQVTVSS

SEQ ID NO: 836 - protein, 120 aa, synthetic construct
EVQLVESGGGLVQPGGSLRLSCAASGSIVSTNGMGWHRQAPGKGRELVAGIRSDGFTNYADSVKGRFTISSDNVKNTVYLQMNSLRAEDTGVYYCYYQALSSANYGQVFWGQGTQVTVSS

SEQ ID NO: 837 - protein, 120 aa, synthetic construct
EVQLVESGGGLVQPGGSLRLSCAASGSIVSTNGMGWHRQAPGKGRELVAGIRSDGFTNYADSVKGRFTISSDNVKNTVYLQMNSLRAEDTGVYYCYYQALSTPNFGQLFWGQGTQVTVSS

SEQ ID NO: 838 - protein, 120 aa, synthetic construct
EVQLVESGGGLVQPGGSLRLSCAASGSIVSTNSMGWHRQAPGKRRELVAGIRSDGFINYADSVKGRFTISSDNVKNTVYLQMNSLRPEDTAVYYCFYQTLSTPNYGQVFWGQGTQVTVSS

SEQ ID NO: 839 - protein, 120 aa, synthetic construct
EVQLVESGGGLVQPGGSLRLSCAASGSIFSLNGMGWHRQAPGKQRELVAGIRSDGMVNYADSVKGRFTISGDNAKSTVYLQMNSLRPEDTAVYYCYYQALSSANYGQVFWGQGTQVTVSS

SEQ ID NO: 840 - protein, 120 aa, synthetic construct
EVQLVESGGGLVQPGGSLRLSCAASGRRFSANAMGWHRQAPGKQRELVAGMQSNGYTNYADSVKGRFTISSDNVKNTVYLQMNSLRPEDTAVYYCYYQSLSTPNYGQVYWGQGTQVTVSS

SEQ ID NO: 841 - protein, 120 aa, synthetic construct
EVQLVESGGGLVQPGGSLRLSCAASGSIVSTNGMGWHRQAPGKGRELVAGIRSDGFTNYADSVKGRFTISSDNVKNTVYLQMNSLRAEDTGVYYCYYQALSSPTYGQPFWGQGTQVTVSS

SEQ ID NO: 842 - protein, 120 aa, synthetic construct
EVQLVESGGGLVQPGGSLRLSCAASGSIVSTNGMGWHRQAPGKGRELVAGIRSDGFTNYADSVKGRFTISSDNVKNTVYLQMNSLRAEDTGVYYCYYQALSTPNSGQTFWGQGTQVTVSS

SEQ ID NO: 843 - protein, 120 aa, synthetic construct
EVQLVESGGGLVQPGGSLRLSCAASGSIVSTNGMGWHRQAPGKGRELVAGIRSDGFTNYADSVKGRFTISSDNVKNTVYLQMNSLRAEDTGVYYCYYQALSTPNYGQTYWGQGTQVTVSS

SEQ ID NO: 844 - protein, 120 aa, synthetic construct
EVQLVESGGGLVQPGGSLRLSCAASGSIVSTNGMGWHRQAPGKGRELVAGIRSDGFTNYADSVKGRFTISSDNVKNTVYLQMNSLRAEDTGVYYCYYQAISSPNYGQVFWGQGTQVTVSS

SEQ ID NO: 845 - protein, 120 aa, synthetic construct
EVQLVESGGGLVQPGGSLRLSCAASGSIVSTNGMGWHRQAPGKGRELVAGIRSDGFTNYADSVKGRFTISSDNVKNTVYLQMNSLRAEDTGVYYCYYHALSTPNSGQVFWGQGTQVTVSS

SEQ ID NO: 846 - protein, 120 aa, synthetic construct
EVQLVESGGGLVQPGGSLRLSCAASGSIVSTNGMGWHRQAPGKGRELVAGIRSDGFTNYADSVKGRFTISSDNVKNTVYLQMNSLRAEDTGVYYCYYQALSTPKSGQVFWGQGTQVTVSS

SEQ ID NO: 847 - protein, 120 aa, synthetic construct
EVQLVESGGGLVQPGGSLRLSCAASGSIVSTNGMGWHRQAPGKGRELVAGIRSDGFTNYADSVKGRFTISSDNVKNTVYLQMNSLRAEDTGVYYCYYQALSTPHSGQVFWGQGTQVTVSS

SEQ ID NO: 848 - protein, 120 aa, synthetic construct
EVQLVESGGGLVQPGGSLRLSCAASGSIVSTNSMGWHRQAPGKGRELVAGIRSDGFINYADSVKGRFTISSDNVKNTVYLQMNSLRPEDTAVYYCFYQPLSTPNYGQVFWGQGTQVTVSS

SEQ ID NO: 849 - protein, 120 aa, synthetic construct
EVQLVESGGGLVQPGGSLRLSCAASGSIVSTNSMGWHRQAPGKRRELVAGIRSDGFINYADSVKGRFTISSDNVKNTVYLQMNSLRPEDTAVYYCFYQPLSTPNYGQVFWGQGTQVTVSS

SEQ ID NO: 850 - protein, 120 aa, synthetic construct
EVQLVESGGGLVQPGGSLRLSCAASGRRFSANAMGWHRQAPGKQRELVAGINSNGYTNYADSVKGRFTISSDNVKNTVYLQMNSLRPEDTAVYYCYYQSLSTPNYGRVFWGQGTQVTVSS

SEQ ID NO: 851 - protein, 120 aa, synthetic construct
EVQLVESGGGLVQPGGSLRLSCAASGRRFSANAMGWHRQAPGKQRELVAGMQSNGYTNYADSVKGRFTISSDNVKNTVYLQMNSLRPEDTAVYYCYYQSLSTPNSGQVFWGQGTQVTVSS

SEQ ID NO: 852 - protein, 120 aa, synthetic construct
EVQLVESGGGLVQPGGSLRLSCAASGSIVSTKAMGWHRQAPGKRRELVAGIRSDGFTNYADSVKGRFTISSDSVKDTVYLQMNSLRAEDTAVYYCFYQALSTPNYGQTFWGQGTQVTVSS

SEQ ID NO: 853 - protein, 120 aa, synthetic construct
EVQLVESGGGLVQPGGSLRLSCAASGSIVSTNAMGWHRQAPGKGRELVAGFRSDGFTNYADSVKGRFTISSDNVKNTVYLQMNSLRAEDTAVYYCFYQALSTPNFGQTFWGQGTQVTVSS

SEQ ID NO: 854 - protein, 120 aa, synthetic construct
EVQLVESGGGLVQPGGSLRLSCAASGSIVSTNGMGWHRQAPGKGRELVAGIRSDGFTNYADSVKGRFTISSDNVKNTVYLQMNSLRAEDTGVYYCYYQALSSPHYGQPFWGQGTQVTVSS

SEQ ID NO: 855 - protein, 120 aa, synthetic construct
EVQLVESGGGLVQPGGSLRLSCAASGSIVSTNGMGWHRQAPGKGRELVAGIRSDGFTNYADSVKGRFTISSDNVKNTVYLQMNSLRAEDTGVYYCYYQAHSSPNYGQPFWGQGTQVTVSS

SEQ ID NO: 856 - protein, 120 aa, synthetic construct
EVQLVESGGGLVQPGGSLRLSCAASGSIVSTNGMGWHRQAPGKGRELVAGIRSDGFTNYADSVKGRFTISSDNVKNTVYLQMNSLRAEDTGVYYCYYQALSSPNYGQPYWGQGTQVTVSS

SEQ ID NO: 857 - protein, 120 aa, synthetic construct
EVQLVESGGGLVQPGGSLRLSCAASGSIVSTNGMGWHRQAPGKGRELVAGIRSDGFTNYADSVKGRFTISSDNVKNTVYLQMNSLRAEDTGVYYCYYQALGSPNYGQPFWGQGTQVTVSS

SEQ ID NO: 858 - protein, 120 aa, synthetic construct
EVQLVESGGGLVQPGGSLRLSCAASGSIVSTNGMGWHRQAPGKGRELVAGIRSDGFTNYADSVKGRFTISSDNVKNTVYLQMNSLRAEDTGVYYCYYQALSSPSYGQVFWGQGTQVTVSS

SEQ ID NO: 859 - protein, 120 aa, synthetic construct
EVQLVESGGGLVQPGGSLRLSCAASGSIVSTNGMGWHRQAPGKGRELVAGIRSDGFTNYADSVKGRFTISSDNVKNTVYLQMNSLRAEDTGVYYCYYQALSAPNYSQVFWGQGTQVTVSS

SEQ ID NO: 860 - protein, 120 aa, synthetic construct
EVQLVESGGGLVQPGGSLRLSCAASGSIVSTNGMGWHRQAPGKGRELVAGIRSDGFTNYADSVKGRFTISSDNVKNTVYLQMNSLRAEDTGVYYCYYQALSSPNSGQVFWGQGTQVTVSS

SEQ ID NO: 861 - protein, 120 aa, synthetic construct
EVQLVESGGGLVQPGGSLRLSCAASGSIVSTNGMGWHRQAPGKGRELVAGIRSDGFTNYADSVKGRFTISSDNVKNTVYLQMNSLRAEDTGVYYCYYQALSSPNYGRVFWGQGTQVTVSS

SEQ ID NO: 862 - protein, 120 aa, synthetic construct
EVQLVESGGGLVQPGGSLRLSCAASGSIVSTNGMGWHRQAPGKGRELVAGIRSDGFTNYADSVKGRFTISSDNVKNTVYLQMNSLRAEDTGVYYCYDQALSTPNDGQVFWGQGTQVTVSS

SEQ ID NO: 863 - protein, 120 aa, synthetic construct
EVQLVESGGGLVQPGGSLRLSCAASGSIVSTNGMGWHRQAPGKGRELVAGIRSDGFTNYADSVKGRFTISSDNVKNTVYLQMNSLRAEDTGVYYCYYQALSTPTDGQVFWGQGTQVTVSS

SEQ ID NO: 864 - protein, 120 aa, synthetic construct
EVQLVESGGGLVQPGGSLRLSCAASGSIVSTNGMGWHRQAPGKGRELVAGIRSDGFTNYADSVKGRFTISSDNVKNTVYLQMNSLRAEDTGVYYCSYQALSTPNSGQVFWGQGTQVTVSS

SEQ ID NO: 865 - protein, 120 aa, synthetic construct
EVQLVESGGGLVQPGGSLRLSCAASGSIVSTNGMGWHRQAPGKGRELVAGIRSDGFTNYADSVKGRFTISSDNVKNTVYLQMNSLRAEDTGVYYCYDQALSTPNYGHVFWGQGTQVTVSS

SEQ ID NO: 866 - protein, 120 aa, synthetic construct
EVQLVESGGGLVQPGGSLRLSCAASGSIVSTNGMGWHRQAPGKGRELVAGIRSDGFTNYADSVKGRFTISSDNVKNTVYLQMNSLRAEDTGVYYCYYQALSTPTSGQVFWGQGTQVTVSS

SEQ ID NO: 867 - protein, 120 aa, synthetic construct
EVQLVESGGGLVQPGGSLRLSCAASGSIVSTNGMGWHRQAPGKGRELVAGIRSDGFTNYADSVKGRFTISSDNVKNTVYLQMNSLRAEDTGVYYCYYQALSTPNDGHVFWGQGTQVTVSS

SEQ ID NO: 868 - protein, 120 aa, synthetic construct
EVQLVESGGGLVQPGGSLRLSCAASGSIVSTNGMGWHRQAPGKGRELVAGIRSDGFTNYADSVKGRFTISSDNVKNTVYLQMNSLRAEDTGVYYCYSQALSTPKYGQVFWGQGTQVTVSS

SEQ ID NO: 869 - protein, 120 aa, synthetic construct
EVQLVESGGGLVQPGGSLRLSCAASGSIVSTNSMGWHRQAPGKRRELVAGIRSDGFINYADSVKGRFTISSDNVKNTVYLQMNSLRPEDTAVYYCSYQSLSTPNYGQVFWGQGTQVTVSS

SEQ ID NO: 870 - protein, 120 aa, synthetic construct
EVQLVESGGGLVQPGGSLRLSCAASGSIVSTNSMGWHRQAPGKRRELVAGIRSDGFINYADSVKGRFTISSDNVKNTVYLQMNSLRPEDTAVYYCLYQSLSTPNYGQVFWGQGTQVTVSS

SEQ ID NO: 871 - protein, 120 aa, synthetic construct
EVQLVESGGGLVQPGGSLRLSCAASGRRFSANAMGWHRQAPGKQRELVAGINSNGYTNYADSVKGRFTISSDNVKNTVYLQMNSLRPEDTAVYYCYYQSLSTPNYGQVFWGQGTQVTVSS

SEQ ID NO: 872 - protein, 120 aa, synthetic construct
EVQLVESGGGLVQPGGSLRLSCAAPGRRFSTNAMGWHRQAPGKQRELVAGINSNGYTNYADSVKGRFTISSDNVKNTVYLQMNSLRPEDTAVYYCYYQSLSTPDYGQVFWGQGTQVTVSS

SEQ ID NO: 873 - protein, 120 aa, synthetic construct
EVQLVESGGGLVQPGGSLRLSCAASGRRFSANAMGWHRQAPGKQRELVAGINSNGYTNYADSVKGRFTISSDNVKNTVYLQMNSLRPEDTAVYYCYYQSLSTPNSGQVFWGQGTQVTVSS

SEQ ID NO: 874 - protein, 120 aa, synthetic construct
EVQLVESGGGLVQPGGSLRLSCAASGSIVSTNGMGWHRQAPGKGRELVAGIRSDGFTNYADSVKGRFTISSDNVKNTVYLQMNSLRAEDTGVYYCYDQALSSPNYGQPFWGQGTQVTVSS

SEQ ID NO: 875 - protein, 120 aa, synthetic construct
EVQLVESGGGLVQPGGSLRLSCAASGSIVSTNGMGWHRQAPGKGRELVAGIRSDGFTNYADSVKGRFTISSDNVKNTVYLQMNSLRAEDTGVYYCYDQALSSPNSGQTFWGQGTQVTVSS

SEQ ID NO: 876 - protein, 120 aa, synthetic construct
EVQLVESGGGLVQPGGSLRLSCAASGSIVSTNGMGWHRQAPGKGRELVAGIRSDGFTNYADSVKGRFTISSDNVKNTVYLQMNSLRAEDTGVYYCYYQALRSPNSGQTFWGQGTQVTVSS

SEQ ID NO: 877 - protein, 120 aa, synthetic construct
EVQLVESGGGLVQPGGSLRLSCAASGSIVSTNGMGWHRQAPGKGRELVAGIRSDGFTNYADSVKGRFTISSDNVKNTVYLQMNSLRAEDTGVYYCYDQALSSPNDGQTFWGQGTQVTVSS

SEQ ID NO: 878 - protein, 120 aa, synthetic construct
EVQLVESGGGLVQPGGSLRLSCAASGSIVSTNGMGWHRQAPGKGRELVAGIRSDGFTNYADSVKGRFTISSDNVKNTVYLQMNSLRAEDTGVYYCYYQALRSPKYGQTFWGQGTQVTVSS

SEQ ID NO: 879 - protein, 120 aa, synthetic construct
EVQLVESGGGLVQPGGSLRLSCAASGSIVSTNGMGWHRQAPGKGRELVAGIRSDGFTNYADSVKGRFTISSDNVKNTVYLQMNSLRAEDTGVYYCYSQALSSPNSGQTFWGQGTQVTVSS

SEQ ID NO: 880 - protein, 120 aa, synthetic construct
EVQLVESGGGLVQPGGSLRLSCAASGSIVSTNGMGWHRQAPGKGRELVAGIRSDGFTNYADSVKGRFTISSDNVKNTVYLQMNSLRAEDTGVYYCYDQALSSPNYGHTFWGQGTQVTVSS

SEQ ID NO: 881 - protein, 120 aa, synthetic construct
EVQLVESGGGLVQPGGSLRLSCAASGSIVSTNGMGWHRQAPGKGRELVAGIRSDGFTNYADSVKGRFTISSDNVKNTVYLQMNSLRAEDTGVYYCYSQALSSPKYGQTFWGQGTQVTVSS

SEQ ID NO: 882 - protein, 120 aa, synthetic construct
EVQLVESGGGLVQPGGSLRLSCAASGSIVSTNGMGWHRQAPGKGRELVAGIRSDGFTNYADSVKGRFTISSDNVKNTVYLQMNSLRAEDTGVYYCYSQALSSPTYGQTFWGQGTQVTVSS

SEQ ID NO: 883 - protein, 120 aa, synthetic construct
EVQLVESGGGLVQPGGSLRLSCAASGSIVSTNGMGWHRQAPGKGRELVAGIRSDGFTNYADSVKGRFTISSDNVKNTVYLQMNSLRAEDTGVYYCYDQALRSPNYGQTFWGQGTQVTVSS

SEQ ID NO: 884 - protein, 120 aa, synthetic construct
EVQLVESGGGLVQPGGSLRLSCAASGSIVSTNGMGWHRQAPGKGRELVAGIRSDGFTNYADSVKGRFTISSDNVKNTVYLQMNSLRAEDTGVYYCYYQALRSPNYGQPFWGQGTQVTVSS

SEQ ID NO: 885 - protein, 120 aa, synthetic construct
EVQLVESGGGLVQPGGSLRLSCAASGSIVSTNGMGWHRQAPGKGRELVAGIRSDGFTNYADSVKGRFTISSDNVKNTVYLQMNSLRAEDTGVYYCYYQALGSPNYGHTFWGQGTQVTVSS

SEQ ID NO: 886 - protein, 120 aa, synthetic construct
EVQLVESGGGLVQPGGSLRVSCAASGSIFRADAMGWHRQAPGKPREFVAGIRSDGFTNYADSVKGRFTISWDTVKNTVYLQMNSLRPEDTAVYYCYYHSLSSPSYGQVFWGQGTQVTVSS

SEQ ID NO: 887 - protein, 120 aa, synthetic construct
EVQLVESGGGLVQPGGSLRVSCAASGSIFRTDAMGWHRQAPGKQREFVAGIRSDGYTNYADSVKGRFTISRDTVKNTVYLQMNSLRPEDTAVYYCYYHSLSSPNYAQVFWGQGTQVTVSS

SEQ ID NO: 888 - protein, 120 aa, synthetic construct
EVQLVESGGGLVQPGGSLRASCAASGSIFRADAMGWHRQAPGKPREFVAGIRSDGFTNYADSVKGRFTISWDTVKNTVYLQMNSLRPEDTAVYYCYYHSLSSPNYGQAFWGQGTQVTVSS

SEQ ID NO: 889 - protein, 120 aa, synthetic construct
EVQLVESGGGLVQPGGSLRVSCAASGSIFRADAMGWHRQAPGKPREFVAGIRSDGFTNYADSVKGRFTISWDTVKNTVYLQMNSLRPEDTAVYYCYSHSLSSPNYGQVFWGQGTQVTVSS

SEQ ID NO: 890 - protein, 120 aa, synthetic construct
EVQLVESGGGLVQPGGSLRVSCAASGSIFRADAMGWHRQAPGKPREFVAGIRSDGFTNYADSVKGRFTISWDTVKNTVYLQMNSLRPEDTAVYYCYYHSLSSPKYGQVFWGQGTQVTVSS

SEQ ID NO: 891 - protein, 120 aa, synthetic construct
EVQLVESGGGLVQPGGSLRLSCAASGSIFSLNGMGWYRQAPGKQRELVAGIRSDGMVNYADSVKGRFTISGDNAKSTVYLQMNSLRPEDTAVYYCYSQSLSSANYGQVFWGQGTQVTVSS

SEQ ID NO: 892 - protein, 120 aa, synthetic construct
EVQLVESGGGLVQPGGSLRLSCAASGSIVSTNGMGWHRQAPGKGRELVAGIRSDGFTNYADSVKGRFTISSDNVKNTVYLQMNSLRAEDTGVYYCYYQALSSPKSGQTFWGQGTQVTVSS

SEQ ID NO: 893 - protein, 120 aa, synthetic construct
EVQLVESGGGLVQPGGSLRLSCAASGSIVSTNGMGWHRQAPGKGRELVAGIRSDGFTNYADSVKGRFTISSDNVKNTVYLQMNSLRAEDTGVYYCYYQALSSPNSGQPFWGQGTQVTVSS

SEQ ID NO: 894 - protein, 120 aa, synthetic construct
EVQLVESGGGLVQPGGSLRLSCAASGSIVSTNGMGWHRQAPGKGRELVAGIRSDGFTNYADSVKGRFTISSDNVKNTVYLQMNSLRAEDTGVYYCYYHALSSPNSGQTFWGQGTQVTVSS

SEQ ID NO: 895 - protein, 120 aa, synthetic construct
EVQLVESGGGLVQPGGSLRLSCAASGSIVSTNGMGWHRQAPGKGRELVAGIRSDGFTNYADSVKGRFTISSDNVKNTVYLQMNSLRAEDTGVYYCYYHALSSPNYGQPFWGQGTQVTVSS

SEQ ID NO: 896 - protein, 120 aa, synthetic construct
EVQLVESGGGLVQPGGSLRLSCAASGSIVSTNGMGWHRQAPGKGRELVAGIRSDGFTNYADSVKGRFTISSDNVKNTVYLQMNSLRAEDTGVYYCYYQALSSPTSGQTFWGQGTQVTVSS

SEQ ID NO: 897 - protein, 120 aa, synthetic construct
EVQLVESGGGLVQPGGSLRVSCAASGSIFRADAMGWHRQAPGKPREFVAGIRSDGFTNYADSVKGRFTISWDTVKNTVYLQMNSLRPEDTAVYYCYYHSLSSPNSGQVFWGQGTQVTVSS

SEQ ID NO: 898 - protein, 120 aa, synthetic construct
EVQLVESGGGLVQPGGSLRLSCAASGSIVSTNGMGWHRQAPGKGRELVAGIRSDGFTNYADSVKGRFTISSDNVKNTVYLQMNSLRAEDTGVYYCYYQALSSPTDGQTFWGQGTQVTVSS

SEQ ID NO: 899 - protein, 120 aa, synthetic construct
EVQLVESGGGLVQPGGSLRLSCAASGSIVSTNGMGWHRQAPGKGRELVAGIRSDGFTNYADSVKGRFTISSDNVKNTVYLQMNSLRAEDTGVYYCYYQAHSSPNSGQTFWGQGTQVTVSS

SEQ ID NO: 900 - protein, 120 aa, synthetic construct
EVQLVESGGGLVQPGGSLRLSCAASGSIVSTNGMGWHRQAPGKGRELVAGIRSDGFTNYADSVKGRFTISSDNVKNTVYLQMNSLRAEDTGVYYCYYQALSSPNSGHTFWGQGTQVTVSS

SEQ ID NO: 901 - protein, 120 aa, synthetic construct
EVQLVESGGGLVQPGGSLRLSCAASGSIVSTNGMGWHRQAPGKGRELVAGIRSDGFTNYADSVKGRFTISSDNVKNTVYLQMNSLRAEDTGVYYCYYQALSSPHSGQTFWGQGTQVTVSS

SEQ ID NO: 902 - protein, 120 aa, synthetic construct
EVQLVESGGGLVQPGGSLRLSCAASGSIVSTNGMGWHRQAPGKGRELVAGIRSDGFTNYADSVKGRFTISSDNVKNTVYLQMNSLRAEDTGVYYCYYQALSSPNSGQTYWGQGTQVTVSS

SEQ ID NO: 903 - protein, 120 aa, synthetic construct
EVQLVESGGGLVQPGGSLRLSCAASGSIVSTNGMGWHRQAPGKGRELVAGIRSDGFTNYADSVKGRFTISSDNVKNTVYLQMNSLRAEDTGVYYCYYQALSSPKYGQPFWGQGTQVTVSS

SEQ ID NO: 904 - protein, 120 aa, synthetic construct
EVQLVESGGGLVQPGGSLRLSCAASGSIVSTNGMGWHRQAPGKGRELVAGIRSDGFTNYADSVKGRFTISSDNVKNTVYLQMNSLRAEDTGVYYCYYQALSSPNDGHTFWGQGTQVTVSS

SEQ ID NO: 905 - protein, 120 aa, synthetic construct
EVQLVESGGGLVQPGGSLRLSCAASGSIVSTNGMGWHRQAPGKGRELVAGIRSDGFTNYADSVKGRFTISSDNVKNTVYLQMNSLRAEDTGVYYCYYQALSSPKYGHTFWGQGTQVTVSS

SEQ ID NO: 906 - protein, 120 aa, synthetic construct
EVQLVESGGGLVQPGGSLRLSCAASGSIVSTNGMGWHRQAPGKGRELVAGIRSDGFTNYADSVKGRFTISSDNVKNTVYLQMNSLRAEDTGVYYCYYQALSSPKYGQTYWGQGTQVTVSS

SEQ ID NO: 907 - protein, 120 aa, synthetic construct
EVQLVESGGGLVQPGGSLRLSCAASGSIVSTNGMGWHRQAPGKGRELVAGIRSDGFTNYADSVKGRFTISSDNDKNTVYLQMNSLRAEDTGVYYCYYQALSSPNYSRTFWGQGTQVTVSS

SEQ ID NO: 908 - protein, 120 aa, synthetic construct
EVQLVESGGGLVQPGGSLRLSCAASGSIFSLNGMGWYRQAPGKQRELVAGIRSDGLVNYADSVKGRFTISGDNAKSTVYLQMNSLRPEDTAVYYCYYQSFSGADYGQVFWGQGTQVTVSS

SEQ ID NO: 909 - protein, 120 aa, synthetic construct
EVQLVESGGGLVQPGGSLRLSCAASGSIFSLNGMGWYRQAPGKQRELVAGIRSNDMANYADSVKGRFTISGDNAKSTVYLQMNSLRPEDTAVYYCYYQSLSGANYGQVFWGQGTLVTVSS

SEQ ID NO: 910 - protein, 120 aa, synthetic construct
EVQLVESGGGLVQPGGSLRLSCAASGSIFSLNGMGWYRQAPGKQRELVAGIRSDGLVNYADSVKGRFTISGDNAKSTVYLQMNSLRPEDTAVYYCYYQSFSSANYGQTIWGQGTQVTVSS

SEQ ID NO: 911 - protein, 120 aa, synthetic construct
EVQLVESGGGLVQPGGSLRLSCAASGSIFSLNAMGWYRQAPGKQRELVAGIRSNGMANYADSVKGRFTISGDNAKSTVYLQMNSLRPEDTAVYYCYYQSFSSDNYGQTFWGQGTQVTVSS

SEQ ID NO: 912 - protein, 120 aa, synthetic construct
EVQLVESGGGLVQPGGSLRLSCAASGSIFSLNGMGWYRQAPGKQRELVAGIRSDGLVNYADSVKGRFTISGDNAKSTVYLQMNSLRPEDTAVYYCYYQSFSTPNFGQTFWGQGTQVTVSS

SEQ ID NO: 913 - protein, 120 aa, synthetic construct
EVQLVESGGGLVQPGGSLRLSCAASGSIFSLNGMGWYRQAPGKQRELVAGIRSDGLVNYADSVKGRFTISGDNAKSTVYLQMNSLRPEDTAVYYCYYQSFSTPNFGQTIWGQGTQVTVSS

SEQ ID NO: 914 - protein, 123 aa, synthetic construct
EVQLLESGGGLVQPGGSLRLSCAASGFTFDGIAMTWVRQAPGKGLEWVSSIYSYGPNTYYADSVKGRFTISTDSAKNTLYLQMNSLRPEDTAVYYCAADSDLSTVVVGPHDYWGQGTQVTVSS

SEQ ID NO: 915 - protein, 123 aa, synthetic construct
EVQLLESGGGLAQPGGSLRLSCAASGFTFDDIAMTWVRQAPGKGLEWVSSIYSYGPNTYYADSVKGRFTISTDSAKNTLYLQMNSLRPEDTAVYYCAADSDLSTVVVGPHDYWGQGTQVTVSS

SEQ ID NO: 916 - protein, 123 aa, synthetic construct
EVQLLESGGGLVQPGGSLRLSCAASGFTFDDIAMTWVRQAPGKGLEWVSSIYSYGPNTYYADSVKGRFTISTDSAKNTLYLQMNSLRPEDTAVYYCAADSDLRTVGVGPHDYWGQGTQVTVSS

SEQ ID NO: 917 - protein, 123 aa, synthetic construct
EVQLLESGGGLVQPGGSLRLSCAASGFTFDDIAMTWVRQAPGKGLEWVSSIYSYGPNTYYADSVKGRFTISTDSAKNTLYLQMNSLRPEDTAVYYCAAESDLRTVVVGPHDYWGQGTQVTVSS

SEQ ID NO: 918 - protein, 123 aa, synthetic construct
EVQLLESGGGLVQPGGSLRLSCAASGFTFDDIAMTWVRQAPGKGLEWVSSIYSYGPNTYYADSVKGRFTISTDSAKNTLYLQMNSLRPEDTAVYYCAADSDLRTGVVGPHDYWGQGTQVTVSS

SEQ ID NO: 919 - protein, 123 aa, synthetic construct
EVQLLESGGGLVQPGGSLRLSCAASGFTFDDIAMTWVRQAPGKGLEWVSSIYSYGPNTYYADSVKGRFTISTDSAKNTLYLQMNSLRPEDTAVYYCAADSDLRTVVVGPHDSWGQGTQVTVSS

SEQ ID NO: 920 - protein, 123 aa, synthetic construct
EVQLLESGGGLVQPGGSLRLSCAASGFTFDDIAMTWVRQAPGKGLEWVSSIYSYGPNTYYADSVKGRFTISTDSAKNTLYLQMNSLRPEDTAVYYCVADSDLSTVVDGPHDYWGQGTQVTVSS

SEQ ID NO: 921 - protein, 123 aa, synthetic construct
EVQLLESGGGLVQPGGSLRLSCAASGFTLDDYAMSWVRQAPGKGLEWVSTIFSYSSNTYYADSVKGRFTISTDNAKNTLYLQMNSLRPEDTAVYYCAADSDLSTVVVGPHDYWGQGTQVTVSS

SEQ ID NO: 922 - protein, 123 aa, synthetic construct
EVQLLESGGGLVQPGGSLRLSCAASGFTLDDYAMSWVRQAPGKGLEWVSTIFSYSSNTYYADSVKGRFTISTDSAKNTLYLQMNSLRPEDTAVYYCAADSDLSTVVVGPHDYWGQGTQVTVSS

SEQ ID NO: 923 - protein, 125 aa, synthetic construct
EVQLLESGGGLAQPGGSLRLSCAASGFTFSGYAMSWARQAPGKGLEWVSGIYSDGSETYYADSVKGRFTISRDNAKNTVYLQMNSLRSEDTAVYYCAKDAGSWGRGPFGFDYDYWGQGTQVTVSS

SEQ ID NO: 924 - protein, 125 aa, synthetic construct
EVQLLESGGGLAQPGGSLRLSCAASGFTFSSYAMSWARQAPGKGLEWVSGISSDGSDTYYADSVKGRFTISRDNAKNTVYLQMNSLRPEDTAVYYCAKDAGSWGTGPFGYEYDYWGQGTQVTVSS

SEQ ID NO: 925 - protein, 125 aa, synthetic construct
EVQLLESGGGLVQPGGSLRLSCAASGFTFSSYAMSWARQAPGKGLEWVSGISSDGSDTYYADSVKGRFTISRDNAKNTVYLQMNSLRPEDTAVYYCAKDAGSWGTGPFGYEYDYWGQGTQVTVSS

SEQ ID NO: 926 - protein, 125 aa, synthetic construct
EVQLLESGGGLVQPGGSLRLSCAASGFTFSGYAMSWARQAPGKGLEWVSGIYSDGSETYYADSVKGRFTISRDNAKNTVYLQMNSLRSEDTAVYYCAKDAGSWGRGPFGFDYDYWGQGTQVTVSS

SEQ ID NO: 927 - protein, 125 aa, synthetic construct
EVQLLESGGGLAQPGGSLRLSCAASGFTFSGYAMGWARQAPGKGLEWVSGIYSDGSETYYADSVKGRFTISRDNAKNTVYLQMNSLRSEDTAVYYCAKDAGSWGRGPFGFDYDYWGQGTQVTVSS

SEQ ID NO: 928 - protein, 125 aa, synthetic construct
EVQLLESGGGLVQPGGSLRLSCAASGFTFSRYAMSWARQAPGKGLEWVSGISDDGSDTYYADSVKGRFTISRDNAKNTVYLQMNSLRPEDTAVYYCAKDAGSWGTGPFGYEYDYWGQGTQVTVSS

SEQ ID NO: 929 - protein, 125 aa, synthetic construct
EVQLLESGGGLAQPGGSLRLSCAASGFTFSSYAMSWARQAPGKGLEWVSGISSDGSDTYYADSVKGRFTISRDNAKNTVYLQMNSLRPEDTAVYYCANDAGGWGTGPFGYEYDYWGQGTQVTVSS

SEQ ID NO: 930 - protein, 125 aa, synthetic construct
EVQLLESGGGLAQPGGSLRLSCAASGFTFSSYAMSWARQAPGKGLEWVSGISSDGSDTYYADSVKGRFTISRDNAKNTVYLQMNSLRPEDTAVYYCAKAAGGWGTGPFGYEYDYWGQGTQVTVSS

SEQ ID NO: 931 - protein, 118 aa, synthetic construct
EVQLLESGGGLVQPGGSLRLSCAASGRTFSDYGMGWFRQAPGKEQEFVATINWSNGRTYYADSVKGRFTISRDNAKNTGYLQMNSLRVEDTAVYYCATTPSGKAYSYWGQGTQVTVSS

SEQ ID NO: 932 - protein, 118 aa, synthetic construct
EVQLLESGGGLVQPGGSLRLSCAASGRTFSDYGMGWFRQAPGKDSEFVAAINWSNGRTNYADSVKGRFTISRDNAKNTGYLQMNSLRVEDTAVYYCATTPSGKAYSYWGQGTQVTVSS

SEQ ID NO: 933 - protein, 118 aa, synthetic construct
EVQLLESGGGLVQPGGSLRLSCAASGRTFSDYGMGWFRQAPGKDSEFVATINWSNGRTSYADSVKGRFTISRDNAKNTGYLQMNSLRVEDTAVYYCAGTPSGKAYTNWGQGTQVTVSS

SEQ ID NO: 934 - protein, 118 aa, synthetic construct
EVQLLESGGGLVQPGGSLRLSCAASGRTFSDYGMGWFRQAPGKDSEFVAAINWSNGRTNYADSVKGRFTISRDNAKNTGYLQMNSLRVEDTAVYYCAVTPSGKAYSYWGQGTQVTVSS

SEQ ID NO: 935 - protein, 118 aa, synthetic construct
EVQLLESGGGLVQPGGSLRLSCAASGRTFSDYGMGWFRQAPGKEREFVATINWSNGRTYYADSVKGRFTISRDNAKNTGYLQMNSLRVEDTAVYYCAATPSGKAFTYWGQGTQVTVSS

SEQ ID NO: 936 - protein, 118 aa, synthetic construct
EVQLLESGGGLVQPGGSLRLSCAASGRTFSDYGMGWFRQAPGKEREFVATINWSNGRTTYADSVKGRFTISRDNAKNTGYLQMNSLRVEDTAVYYCAATPSGKAFTYWGQGTQVTVSS

SEQ ID NO: 937 - protein, 118 aa, synthetic construct
EVQLLESGGGLVQPGGSLRLSCAASGRTFSDYGMGWFRQAPGKEQEFVATINWSNGRTYYADSVKGRFTISRDNAKNTGYLQMNSLRVEDTAVYYCAATPTGKAYSYWGQGTQVTVSS

SEQ ID NO: 938 - protein, 118 aa, synthetic construct
EVQLLESGGGLVQPGGSLRLSCAASGRTFSDYGMGWFRQAPGKEREFVATINWSNGRTTYADSVKGRFTISRDNAKNTGYLQMNSLRVEDTAVYYCAATPSGKAYTYWGQGTQVTVSS

SEQ ID NO: 939 - protein, 118 aa, synthetic construct
EVQLLESGGGLVQPGGSLRLSCAASGRTFSDYGMGWFRQAPGKEREFVATINWSNGRTTYADSVKGRFTISRDNAKNTGYLQMNSLRVEDTAVYYCAATPTGKAYTYWGQGTQVTVSS

SEQ ID NO: 940 - protein, 118 aa, synthetic construct
EVQLLESGGGLVQPGGSLRLSCAASGRTFSDYGMGWFRQAPGKEREFVATINWSNGRTTYADSVKGRFTISRDNAKNTGYLQMNSLRVEDTAVYYCAATPAGKAYTYWGQGTQVTVSS

SEQ ID NO: 941 - protein, 118 aa, synthetic construct
EVQLLESGGGLVQPGGSLRLSCAASGRTFSDYGMGWFRQAPGKEREFVATINWSNGRTTYADSVKGRFTISRDTAKNTGYLQMNSLRVEDTAVYYCAATPAGKAYTYWGQGTQVTVSS

SEQ ID NO: 942 - protein, 118 aa, synthetic construct
EVQLLESGGGLVQPGGSLRLSCAASGRTFSDYGMGWFRQAPGKEHEFVASINWSNGRTSYADSAKGRFTISRDNAKNTGYLQMNSLRVEDTAVYYCAGTLSGKAYTYWGQGTQVTVSS

SEQ ID NO: 943 - protein, 118 aa, synthetic construct
EVQLLESGGGLVQPGGSLRLSCAASGRTFSDYGMGWFRQAPGKEREFVATINWSNGRTTYADSVKGRFTISRDNAKNTGYLQMNSLRVEDTAVYYCAATPSGKAYSNWGQGTQVTVSS

SEQ ID NO: 944 - protein, 118 aa, synthetic construct
EVQLLESGGGLVQPGGSLRLSCAASGRTFSDYGMGWFRQAPGKEREFVATINWSNGRTTYADSVKGRFTISRDNAKNTGYLQMNSLRVEDTAVYYCAATPSGRAYTYWGQGTQVTVSS

SEQ ID NO: 945 - protein, 118 aa, synthetic construct
EVQLLESGGGLVQPGGSLRLSCAASGRTFSDYGMGWFRQAPGKEREFVATINWSNGRTTYADSVKGRFTISRDNAKNTGYLQMNSLRVEDTAVYYCAANPSGKAYTYWGQGTQVTVSS

SEQ ID NO: 946 - protein, 118 aa, synthetic construct
EVQLLESGGGLVQPGGSLRLSCAASGRTFSDYGMGWFRQAPGKEREFVATINWSNGRTTYADSVKGRFTISRDNAKNTGYLQMNSLRVEDTAVYYCAATPSAKAYTYWGQGTQVTVSS

SEQ ID NO: 947 - protein, 118 aa, synthetic construct
EVQLLESGGGLVQPGGSLRLSCAASGRTFSDYGMGWFRQAPGKEREFVATINWSNGRTTYADSVKGRFTISRDNAKNTGYLQMNSLRVEDTAVYYCAATPSGKADTYWGQGTQVTVSS

SEQ ID NO: 948 - protein, 118 aa, synthetic construct
EVQLLESGGGLVQPGGSLRLSCAASGRTFSDYGMGWFRQAPGKEREFVATINWSNGRTTYADSVKGRFTISRDNAKNTGYLQMNSLRVEDTAVYYCAATPSGKANTYWGQGTQVTVSS

SEQ ID NO: 949 - protein, 118 aa, synthetic construct
EVQLLESGGGLVQPGGSLRLSCAASGRTFSDYGMGWFRQAPGKEREFVATINWSNGRTTYADSVKGRFTISRDNAKNTGYLQMNSLRVEDTAVYYCAATPSGRAFTYWGQGTQVTVSS

SEQ ID NO: 950 - protein, 118 aa, synthetic construct
EVQLLESGGGLVQPGGSLRLSCAASGRTFSDYGMGWFRQAPGKEREFVATINWSNGRTTYADSVKGRFTISRDNAKNTGYLQMNSLRVEDTAVYYCAATTSGKAYTYWGQGTQVTVSS

SEQ ID NO: 951 - protein, 118 aa, synthetic construct
EVQLLESGGGLVQPGGSLRLSCAASGRTFSDYGMGWFRQAPGKEREFVATINWSNGRTTYADSVKGRFTISRDNAKNTGYLQMNSLRVEDTAVYYCAATPSGQAYTYWGQGTQVTVSS

SEQ ID NO: 952 - protein, 118 aa, synthetic construct
EVQLLESGGGLVQPGGSLRLSCAASGRTFSDYGMGWFRQAPGKEREFVATINWSNGRTTYADSVKGRFTISRDTAKNTGYLQMNSLRVEDTAVYYCAATPSGQAYTYWGQGTQVTVSS

SEQ ID NO: 953 - protein, 118 aa, synthetic construct
EVQLLESGGGLVQPGGSLRLSCAASGRTFSDYGMGWFRQAPGKEREFVATINWSNGRTTYADSVKGRFTISRDNAKNTGYLQMNSLRVEDTAVYYCAAPPSGKAYTYWGQGTQVTVSS

SEQ ID NO: 954 - protein, 118 aa, synthetic construct
EVQLLESGGGLVQPGGSLRLSCAASGRTFSDYGMGWFRQAPGKEREFVATINWSNGRTTYADSVKGRFTISRDNAKNTGYLQMNSLRVEDTAVYYCAATPSGKEYTYWGQGTQVTVSS

SEQ ID NO: 955 - protein, 118 aa, synthetic construct
EVQLLESGGGLVQPGGSLRLSCAASGRTFSDYGMGWFRQAPGKEREFVATINWSNGRTTYADSVKGRFTISRDNAKNTVYLQMNSLRVEDTAVYYCAATPSGKEYTYWGQGTQVTVSS

SEQ ID NO: 956 - protein, 118 aa, synthetic construct
EVQLLESGGGLVQPGGSLRLSCAASGRTFSDYGMGWFRQAPGKEREFVATINWSNGRTTYADSVKGRFTISRDNAKNTGYLQMNSLRVEDTAVYYCAATPSGTAYTYWGQGTQVTVSS

SEQ ID NO: 957 - protein, 118 aa, synthetic construct
EVQLLESGGGLVQPGGSLRLSCAASGRTFSDYGMGWFRQAPGKEREFVATINWSNGRTTYADSVKGRFTISRDNAKNTGYLQMNSLRVEDTAVYYCAAAPSGKAYTYWGQGTQVTVSS

SEQ ID NO: 958 - protein, 118 aa, synthetic construct
EVQLLESGGGLVQPGGSLRLSCAASGRTFSDYGMGWFRQAPGKEQEFVATINWSNGRTYYADSVKGRFTISRDNAKNTGYLQMNSLRVEDTAVYYCAATPSGKAYSHWGQGTQVTVSS

SEQ ID NO: 959 - protein, 118 aa, synthetic construct
EVQLLESGGGLVQPGGSLRLSCAASGRTFSDYGMGWFRQAPGKEQEFVATINWSNGRTYYADSVKGRFTISRDNAKNTGYLQMNSLRVEDTAVYYCAATPSGKAYSNWGQGTQVTVSS

SEQ ID NO: 960 - protein, 118 aa, synthetic construct
EVQLLESGGGLVQPGGSLRLSCAASGRTFSDYGMGWFRQAPGKDSEFVAAINWSNGRTNYADSVKGRFTISRDNAKNTGYLQMNSLRVEDTAVYYCAATPFGKAYSYWGQGTQVTVSS

SEQ ID NO: 961 - protein, 118 aa, synthetic construct
EVQLLESGGGLVQPGGSLRLSCAASGRTFSDYGMGWFRQAPGKDSEFVAAINWSNGRTNYADSVKGRFTISRDNAKNTGYLQMNSLRVEDTAVYYCAAPPSGKAYSYWGQGTQVTVSS

SEQ ID NO: 962 - protein, 118 aa, synthetic construct
EVQLLESGGGLVQPGGSLRLSCAASGRTFSDYGMGWFRQAPGKEHEFVASINWSNGRTSYADSAKGRFTISRDNAKNTGYLQMNSLRVEDTAVYYCAGTPSGKAYSYWGQGTQVTVSS

SEQ ID NO: 963 - protein, 118 aa, synthetic construct
EVQLLESGGGLVQPGGSLRLSCAASGRTFSDYGMGWFRQAPGKEREFVATINWSNGRTTYADSVKGRFTISRDNAKNTGYLQMNSLRVEDTAVYYCAASPSGKAYTYWGQGTQVTVSS

SEQ ID NO: 964 - protein, 118 aa, synthetic construct
EVQLLESGGGLVQPGGSLRLSCAASGRTFSDYGMGWFRQAPGKEREFVATINWSNGRTTYADSVKGRFTISRDNAKNTGYLQMNSLRVEDTAVYYCAATHSGKAYTYWGQGTQVTVSS

SEQ ID NO: 965 - protein, 118 aa, synthetic construct
EVQLLESGGGLVQPGGSLRLSCAASGRTFSDYGMGWFRQAPGKEREFVATINWSNGRTTYADSVKGRFTISRDNAKNTGYLQMNSLRVEDTAVYYCAATPPGKAYTYWGQGTQVTVSS

SEQ ID NO: 966 - protein, 118 aa, synthetic construct
EVQLLESGGGLVQPGGSLRLSCAASGRTFSDYGMGWFRQAPGKEREFVATINWSNGRTTYADSVKGRFTISRDNAKNTGYLQMNSLRVEDTAVYYCAATPSGKAHTYWGQGTQVTVSS

SEQ ID NO: 967 - protein, 118 aa, synthetic construct
EVQLLESGGGLVQPGGSLRLSCAASGRTFSDYGMGWFRQAPGKEREFVATINWSNGRTTYADSVKGRFTISRDNAKNTGYLQMNSLRVEDTAVYYCAATPSGKSYTYWGQGTQVTVSS

SEQ ID NO: 968 - protein, 118 aa, synthetic construct
EVQLLESGGGLVQPGGSLRLSCAASGRTFSDYGMGWFRQAPGKEREFVATINWSNGRTTYADSVKGRFTISRDNAKNTGYLQMNSLRVEDTAVYYCAATPSGKVYTYWGQGTQVTVSS

SEQ ID NO: 969 - protein, 118 aa, synthetic construct
EVQLLESGGGLVQPGGSLRLSCAASGRTFSDYGMGWFRQAPGKEREFVATINWSNGRTTYADSVKGRFTISRDNAKNTGYLQMNSLRVEDTAVYYCAATPSGMAYTYWGQGTQVTVSS

SEQ ID NO: 970 - protein, 118 aa, synthetic construct
EVQLLESGGGLVQPGGSLRLSCAASGRTFSDYGMGWFRQAPGKEREFVATINWSNGRTTYADSVKGRFTISRDNAKNTGYLQMNSLRVEDTAVYYCAATPSGNAYTYWGQGTQVTVSS

SEQ ID NO: 971 - protein, 118 aa, synthetic construct
EVQLLESGGGLVQPGGSLRLSCAASGRTFSDYGMGWFRQAPGKEREFVATINWSNGRTTYADSVKGRFTISRDNAKNTGYLQMNSLRVEDTAVYYCAATPSRKAYTYWGQGTQVTVSS

SEQ ID NO: 972 - protein, 118 aa, synthetic construct
EVQLLESGGGLVQPGGSLRLSCAASGRTFSDYGMGWFRQAPGKEREFVATINWSNGRTTYADSVKGRFTISRDNAKNTGYLQMNSLRVEDTAVYYCAATPSVKAYTYWGQGTQVTVSS

SEQ ID NO: 973 - protein, 118 aa, synthetic construct
EVQLLESGGGLVQPGGSLRLSCAASGRTFSDYGMGWFRQAPGKEREFVATINWSNGRTTYADSVKGRFTISRDNAKNTGYLQMNSLRVEDTAVYYCAATPYGKAYTYWGQGTQVTVSS

SEQ ID NO: 974 - protein, 118 aa, synthetic construct
EVQLLESGGGLVQPGGSLRLSCAPSGRTFSDYGMGWFRQAPGKEREFVATINWSNGRTAYADSVKGRFTISRDSAKNTGYLQMNSLRVEDTAVYYCAATPSGRAYTYWGQGTQVTVSS

SEQ ID NO: 975 - protein, 118 aa, synthetic construct
EVQLLESGGGLVQPGGSLRLSCAASGRTFSDYGMGWFRQAPGKEHEFVASINWSNGRTSYADSAKGRFTISRDNAKNTGYLQMNSLRVEDTAVYYCAAPPSGKAYTYWGQGTQVTVSS

SEQ ID NO: 976 - protein, 118 aa, synthetic construct
EVQLLESGGGLVQPGGSLRLSCAASGRTFSDYGMGWFRQAPGKEREFVATINWSNGRTTYADSVKGRFTISRDNAKNTGYLQMNSLRVEDTAVYYCAATLSGKAYTYWGQGTQVTVSS

SEQ ID NO: 977 - protein, 118 aa, synthetic construct
EVQLLESGGGLVQPGGSLRLSCAASGRTFSDYGMGWFRQAPGKEREFVATINWSNGRTTYADSVKGRFTISRDNAKNTGYLQMNSLRVEDTAVYYCAATPSGEAYTYWGQGTQVTVSS

SEQ ID NO: 978 - protein, 118 aa, synthetic construct
EVQLLESGGGLVQPGGSLRLSCAASGRTFSDYGMGWFRQAPGKESEFVATIQWSNGRTSYADSVKGRFTISRDNAKNTGYLQMNSLRVEDTAVYYCAATPFGKAYTYWGQGTQVTVSS

SEQ ID NO: 979 - protein, 118 aa, synthetic construct
EVQLLESGGGLVQPGGSLRLSCAASGRTFSSYYIGWFRQAPGKEGEFVAGISWSGKSTSYADSVKGRFTISRDNAKNTGYLQMNSLRVEDTAVYYCAATPSGKAYTYWGQGTQVTVSS

SEQ ID NO: 980 - protein, 118 aa, synthetic construct
EVQLLESGGGLVQPGGSLRLSCAASGRTFSDYGMGWFRQAPGKDSEFVAAINWSNGRTNYADSVKGRFTISRDNAKNTGYLQMNSLRVEDTAVYYCAATPSGQAYSYWGQGTQVTVSS

SEQ ID NO: 981 - protein, 118 aa, synthetic construct
EVQLLESGGGLVQPGGSLRLSCAASGRTFSDYGMGWFRQAPGKDSEFVAAINWSNGRTNYADSVKGRFTISRDNAKNTGYLQMNSLRVEDTAVYYCAATPSGEAYSYWGQGTQVTVSS

SEQ ID NO: 982 - protein, 118 aa, synthetic construct
EVQLLESGGGLVQPGGSLRLSCAASGRTFSDYGMGWFRQAPGKDSEFVAAINWSNGRTNYADSVKGRFTISRDNAKNTGYLQMNSLRVEDTAVYYCTATPSGKAYSYWGQGTQVTVSS

SEQ ID NO: 983 - protein, 118 aa, synthetic construct
EVQLLESGGGLVQPGGSLRLSCAASGRTFSDYGMGWFRQAPGKEHEFVASINWSNGRTSYADSAKGRFTISRDNAKNTGYLQMNSLRVEDTAVYYCAATPSGKAYTYWGQGTQVTVSS

SEQ ID NO: 984 - protein, 118 aa, synthetic construct
EVQLLESGGGLVQPGGSLRLSCAASGRTFSDYGMGWFRQAPGKEREFVATINWSNGRTTYADSVKGRFTISRDNAKNTGYLQMNSLRVEDTAVYYCAAIPSGKAYTYWGQGTQVTVSS

SEQ ID NO: 985 - protein, 118 aa, synthetic construct
EVQLLESGGGLVQPGGSLRLSCAASGRTFSDYGMGWFRQAPGKEREFVATINWSNGRTTYADSVKGRFTISRDNAKNTGYLQMNSLRVEDTAVYYCAATASGKAYTYWGQGTQVTVSS

SEQ ID NO: 986 - protein, 118 aa, synthetic construct
EVQLLESGGGLVQPGGSLRLSCAASGRTFSDYGMGWFRQAPGKEREFVATINWSNGRTTYADSVKGRFTISRDNAKNTGYLQMNSLRVEDTAVYYCAATPSGKGYTYWGQGTQVTVSS

SEQ ID NO: 987 - protein, 118 aa, synthetic construct
EVQLLESGGGLVQPGGSLRLSCAASGRTFSDYGMGWFRQAPGKEREFVATINWSNGRTTYADSVKGRFTISRDNAKNTGYLQMNSLRVEDTAVYYCAATPSGKPYTYWGQGTQVTVSS

SEQ ID NO: 988 - protein, 118 aa, synthetic construct
EVQLLESGGGLVQPGGSLRLSCAASGRTFSDYGMGWFRQAPGKEREFVATINWSNGRTTYADSVKGRFTISRDNAKNTGYLQMNSLRVEDTAVYYCAATRSGKAYTYWGQGTQVTVSS

SEQ ID NO: 989 - protein, 118 aa, synthetic construct
EVQLLESGGGLVQPGGSLRLSCAASGRTFSDYGMGWFRQAPGKEREFVATINWSNGRTTYADSVKGRFTISRDNAKNTGYLQMNSLRVEDTAVYYCAATSSGKAYTYWGQGTQVTVSS

SEQ ID NO: 990 - protein, 118 aa, synthetic construct
EVQLLESGGGLVQPGGSLRLSCAASGRTFSDYGMGWFRQAPGKEREFVATINWSNGRTTYADSVKGRFTISRDTAKNTGYLQMNSLRVEDTAVYYCAAPPSGKAYTYWGQGTQVTVSS

SEQ ID NO: 991 - protein, 118 aa, synthetic construct
EVQLLESGGGLVQPGGSLRLSCAASGRTFSDYGMGWFRQAPGKEREFVATINWSNGRTTYADSVKGRFTISRDNAKNTGYLQMNSLRVEDTAVYYCAATPSGKTYTYWGQGTQVTVSS

SEQ ID NO: 992 - protein, 118 aa, synthetic construct
EVQLLESGGGLVQPGGSLRLSCAASGRTFSDYGMGWFRQAPGKEREFVATINWSNGRTTYADSVKGRFTISRDNAKNTGYLQMNSLRVEDTAVYYCAATPFGKAYTYWGQGTQVTVSS

SEQ ID NO: 993 - protein, 118 aa, synthetic construct
EVQLLESGGGLVQPGGSLRLSCAASGRTFSDYGMGWFRQAPGKEREFVATINWSTGRTTYADSVKGRFTISRDNAKNTGYLQMNSLRVEDTAVYYCAATPSGQAYTYWGQGTQVTVSS

SEQ ID NO: 994 - protein, 118 aa, synthetic construct
EVQLLESGGGLVQPGGSLRLSCAASGRTFSDYGMGWFRQAPGKEREFVATINWSNGRTTYADSVKGRFTTSRDNAKNTGYLQMNSLRVEDTAVYYCAATPTGKAYTYWGQGTQVTVSS

SEQ ID NO: 995 - protein, 118 aa, synthetic construct
EVQLLESGGGLVQPGGSLRLSCAASGRTFSDYGMGWFRQAPGKEREFVATINWSNGRTTYADSVKGRFTISRDTAKNTGYLQMNSLRVEDTAVYYCAATPSGTAYTYWGQGTQVTVSS

SEQ ID NO: 996 - protein, 118 aa, synthetic construct
EVQLLESGGGLVQPGGSLRLSCAASGRTFSDYGMGWFRQAPGKDSEFVATINWSNGRTSYADSVKGRFTISRDNAKNTGYLQMNSLRVEDTAVYYCAGTPSGKAYTYWGQGTQVTVSS

SEQ ID NO: 997 - protein, 118 aa, synthetic construct
EVQLLESGGGLVQPGGSLRLSCAASGRTFSDYGMGWFRQAPGKEHEFVASINWSNGRTSYADSAKGRFTISRDNAKNTGYLQMNSLRVEDTAVYYCAGTPSGEAYTYWGQGTQVTVSS

SEQ ID NO: 998 - protein, 118 aa, synthetic construct
EVQLLESGGGLVQPGGSLRLSCAASGRTFSDYGMGWFRQAPGKEHEFVASINWSNGRTSYADSAKGRFTISRDNAKNTGYLQMNSLRVEDTAVYYCAGTPSGKTYTYWGQGTQVTVSS

SEQ ID NO: 999 - protein, 118 aa, synthetic construct
EVQLLESGGGLVQPGGSLRLSCAASGRTFSDYGMGWFRQAPGKEHEFVASINWSNGRTSYADSAKGRFTISRDNAKNTGYLQMNSLRVEDTAVYYCAGTPSGKAYAYWGQGTQVTVSS

SEQ ID NO: 1000 - protein, 118 aa, synthetic construct
EVQLLESGGGLVQPGGSLRLSCAASGRTFSDYGMGWFRQAPGKEHEFVASINWSNGRTSYADSAKGRFTISRDNAKNTGYLQMNSLRVEDTAVYYCAGTPSGKAYTYWGQGTQVTVSS

SEQ ID NO: 1001 - protein, 118 aa, synthetic construct
EVQLLESGGGLVQPGGSLRLSCAASGRTFSDYGMGWFRQAPGKEHEFVASINWSNGRTSYADSAKGRFTISRDNAKNTGYLQMNSLRVEDTAVYYCAGTPSGKAYTSWGQGTQVTVSS

SEQ ID NO: 1002 - protein, 118 aa, synthetic construct
EVQLLESGGGLVQPGGSLRLSCAASGRTFGNYTMGWFRQAPGKEREFLASIRWTGGSTSYADSVKGRFTISRDNAKKTVYLQMNSLRPEDTAVYYCVATPSGKAYSYWGQGTQVTVSS

SEQ ID NO: 1003 - protein, 129 aa, synthetic construct
EVQLLESGGGLVQPGGSLRLSCAASGFTLDYYAIGWFRQAPGKEREGVSCISTSDGSTYYADSVKGRFTISRDNAKNTVYLQMNSLRPEDTGVYYCATPGPYMYCAPYGSSWSRGYDYWGQGTQVTVSS

SEQ ID NO: 1004 - protein, 129 aa, synthetic construct
EVQLLESGGGLVQPGGSLRLSCAVSGFTLDYYAIGWFRQAPGKEREGVSCINVGDGSTGYADSVKGRFTISRDNAKNTVYLQMNSLRPEDTAVYYCATPGPYSYCAPYGSSWSRGYDYWGQGTQVTVSS

SEQ ID NO: 1005 - protein, 118 aa, synthetic construct
EVQLLESGGGLAQPGGSLRLSCAASGFNFSMYSMSWVRQAPGKGPEWVSAIDTGGSTRYADSVKGRFTISRDNAKNTLYLQMNSLRPEDTAVYYCARVRGTPYEYGYRGQGTQVTVSS

SEQ ID NO: 1006 - protein, 118 aa, synthetic construct
EVQLLESGGGLVQPGGSLRLSCAASGFNFSMYSMSWVRQAPGKGPEWVSAIDTGGSTRYADSVKGRFTISRDNAKNTLYLQMNSLRPEDTAVYYCARVRGTPYDYGYRGQGTQVTVSS

SEQ ID NO: 1007 - protein, 118 aa, synthetic construct
EVQLLESGGGLVQPGGSLRLSCAASGFNFSMYSMSWVRQAPGKGPEWVSAIDTGGSTRYADSVKGRFTISRDNAKNTLYLQMNSLRPEDTAVYYCARVRGTTYEYGYRGQGTQVTVSS

SEQ ID NO: 1008 - protein, 118 aa, synthetic construct
EVQLLESGGGLVQPGGSLRLSCAASGFNFSMYSMSWVRQAPGKGPEWVSAIDTGGSTRYADSVKGRFTISRDNAKNTLYLQMNSLRPEDTAVYYCARVRGTQYEYGYRGQGTQVTVSS

SEQ ID NO: 1009 - protein, 118 aa, synthetic construct
EVQLLESGGGLVQPGGSLRLSCAASGFNFSMYSMSWVRQAPGKGPEWVSAIDTGGSTRYADSVKGRFTISRDNAKNTLYLQMNSLRPEDTAVYYCARVRGTPSEYGYRGQGTQVTVSS

SEQ ID NO: 1010 - protein, 118 aa, synthetic construct
EVQLLESGGGLVQPGGSLRLSCAASGFNFSMYSMSWVRQAPGKGPEWVSAIDTGGSTRYADSVKGRFTISRDNAKNTLYLQMNSLRPEDTAVYYCARVQGTPYEYGYRGQGTQVTVSS

SEQ ID NO: 1011 - protein, 118 aa, synthetic construct
EVQLLESGGGLVQPGGSLRLSCAASGFNFSMYSMSWVRQAPGKGPEWVSAIDTGGSTRYADSVKGRFTISRDNAKNTLYLQMNSLRPEDTAVYYCARVRVTPYEYGYRGQGTQVTVSS

SEQ ID NO: 1012 - protein, 118 aa, synthetic construct
EVQLLESGGGLVQPGGSLRLSCAASGFNFSMYSMSWVRQAPGKGPEWVSAIDTGGSTRYADSVKGRFTISRDNAKNTLYLQMNSLRPEDTAVYYCARVRGTPYVYGYRGQGTQVTVSS

SEQ ID NO: 1013 - protein, 118 aa, synthetic construct
EVQLLESGGGLVQPGGSLRLSCAASGFNFSMYSMSWVRQAPGKGPEWVSAIDTGGSTRYADSVKGRFTISRDNAKNTLYLQMNSLRPEDTAVYYCARVLGTPYEYGYRGQGTQVTVSS

SEQ ID NO: 1014 - protein, 118 aa, synthetic construct
EVQLLESGGGLVQPGGSLRLSCAASGFNFSMYSMSWVRQAPGKGPEWVSAIDTGGSTRYADSVKGRFTISRDNAKNTLYLQVNSLRPEDTAVYYCARVRGTPYEYGYRGQGTQVTVSS

SEQ ID NO: 1015 - protein, 118 aa, synthetic construct
EVQLLESGGGLVQPGGSLRLSCAASGFNFSMYSMSWVRQAPGKGPEWVSAIDTGGSTRYADSVKGRFTISRDNAKNTLYLQMNSLRPEDTAVYYCARVRDTPYEYGYRGQGTQVTVSS

SEQ ID NO: 1016 - protein, 118 aa, synthetic construct
EVQLLESGGGLVQPGGSLRLSCAASGFNFSMYSMSWVRQAPGKGPEWVSAIDTGGSTRYADSVKGRFTISRDNAKNTLYLQMNSLRPEDTAVYYCARVRGTPFEYGYRGQGTQVTVSS

SEQ ID NO: 1017 - protein, 118 aa, synthetic construct
EVQLLESGGGLVQPGGSLRLSCAASGFNFSMYSMSWVRQAPGKGPEWVSAIDTGGSTRYADSVKGRFTISRDNAKNTLYLQMNSLRPEDTAVYYCARVWGTPYEYGYRGQGTQVTVSS

SEQ ID NO: 1018 - protein, 118 aa, synthetic construct
EVQLLESGGGLVQPGGSLRLSCAASGFNFSMYSMSWVRQAPGKGPEWVSAIDTGGSTRYADSVKGRFTISRDNAKNTLYLQMNSLRPEDTAVYYCARVRGKPYEYGYRGQGTQVTVSS

SEQ ID NO: 1019 - protein, 118 aa, synthetic construct
EVQLLESGGGLVQPGGSLRLSCAASGFNFSMYSMSWVRQAPGKGPEWVSAIDTGGSTRYADSVKGRFTISRDNAKNTLYLQMNSLRPEDTAVYYCARVRGTPYGYGYRGQGTQVTVSS

SEQ ID NO: 1020 - protein, 118 aa, synthetic construct
EVQLLESGGGLVQPGGSLRLSCAASGFNFSMYSMSWVRQAPGKGPEWVSAIDTGGSTRYADSVKGRFTISRDNAKNTLYLQMNSLRPEDTAVYYCARVRGTPYAYGYRGQGTQVTVSS

SEQ ID NO: 1021 - protein, 118 aa, synthetic construct
EVQLLESGGGLVQPGGSLRLSCAASGFNFSMYSMSWVRQAPGKGPEWVSAIDTGGSTRYADSVKGRFTISRDNAKNTLYLQMNSLRPEDTAVYYCARVRGTPHEYGYRGQGTQVTVSS

SEQ ID NO: 1022 - protein, 118 aa, synthetic construct
EVQLLESGGGLVQPGGSLRLSCAASGFNFSMYSMSWVRQAPGKGPEWVSAIDTGGSTRYADSVKGRFTISRDNAKNTLYLQMNSLRPEDTAVYYCARVRGTPNEYGYRGQGTQVTVSS

SEQ ID NO: 1023 - protein, 118 aa, synthetic construct
EVQLLESGGGLAQPGGSLRLSCAASGFNFSMYSMSWVRQAPGKGPEWVSAIDTGGSTRYADSVKGRFTISRDNAKNTLYLQMNSLRPEDTAVYYCARVRGTPYDYGYRGQGTQVTVSS

SEQ ID NO: 1024 - protein, 118 aa, synthetic construct
EVQLLESGGGLVQPGGSLRLSCAASGFNFSMYSMSWVRQAPGKGPEWVSAIDTGGSTRYADSVKGRFTISRDNDKNTLYLQMNSLRPEDTAVYYCARVRGTPYDYGYRGQGTQVTVSS

SEQ ID NO: 1025 - protein, 118 aa, synthetic construct
EVQLLESGGGLVQPGGSLRLSCAASGFNFSMYSMSWVRQAPGKGPEWVSAIDTGGSTRYADSVKGRFTISRDNAKNTLYLQMNSLRPEDTAVYYCARVRGPPYEYGYRGQGTQVTVSS

SEQ ID NO: 1026 - protein, 118 aa, synthetic construct
EVQLLESGGGLVQPGGSLRLSCAASGFNFSMYSMSWVRQAPGKGPEWVSAIDTGGSTRYADSVKGRFTISRDNAKNTLYLQMNSLRPEDTAVYYCARVRGTPYKYGYRGQGTQVTVSS

SEQ ID NO: 1027 - protein, 119 aa, synthetic construct
EVQLLESGGGLVQPGGSLRLSCAASGFTFDDIAMTWVRQAPGKGLEWVSSIYSYGPNTYYADSVKGRFTISTDSAKNTLYLQMNSLRPEDTAVYYCARVRGTPYDYGYRGQGTQVTVSS

SEQ ID NO: 1028 - protein, 118 aa, synthetic construct
EVQLLESGGGLVQPGGSLRLSCAASGFNFSMYSMSWVRQAPGKGPEWVSAIDTGGSTRYADSVKGRFTISRDNAKNTLYLQVNSLRPEDTAVYYCARVRGTPYDYGYRGQGTQVTVSS

SEQ ID NO: 1029 - protein, 118 aa, synthetic construct
EVQLLESGGGLVQPGGSLRLSCAASGFNFSMYSMSWVRQAPGKGPEWVSAIDTGGSTRYADSVKGRFTISRDNAKNTLYLQMNSLRPEDTAVYYCARVRGTRYEYGYRGQGTQVTVSS

SEQ ID NO: 1030 - protein, 118 aa, synthetic construct
EVQLLESGGGLVQPGGSLRLSCAASGFNFSMYSMSWVRQAPGKGPEWVSAIDTGGSTRYADSVKGRFTISRDNAKNTLYLQMNSLRPEDTAVYYCARVRGTPYDYAYWGQGTQVTVSS

SEQ ID NO: 1031 - protein, 118 aa, synthetic construct
EVQLLESGGGLVQPGGSLRLSCAASGFNFSMYSMSWVRQAPGKGPEWVSAIDTGGSTRYADSVKGRFTISRDNAKNTLYLQLNSLRPEDTAVYYCARVRGTPYDYGYRGQGTQVTVSS

SEQ ID NO: 1032 - protein, 118 aa, synthetic construct
EVQLLESGGGLVQPGGSLRLSCAASGFNFSMYSMSWVRQAPGKGPEWVSAIDTGGSTRYADSVKGRFTISRDNAKNTLYLQMNSLRPEDTAVYYCARVRGTPDEYGYRGQGTQVTVSS

SEQ ID NO: 1033 - protein, 118 aa, synthetic construct
EVQLLESGGGLVQPGGSLRLSCAASGFTFSMYSMSWVRQAPGKGPEWVSAIDTGGSTRYADSVKGRFTISRDNAKNTLYLQMNSLRPEDTGVYYCARVRGSPYDYNYRGQGTQVTVSS

SEQ ID NO: 1034 - protein, 118 aa, synthetic construct
EVQLLESGGGLAQPGGSLRLSCAASGFTFSMYSMSWVRQAPGKGPEWVSAIDTRGSTRYADSVKGRFTISRDNAKNTLYLQMNSLRPEDTAVYYCARVGGAPYEYNYRGQGTQVTVSS

SEQ ID NO: 1035 - protein, 118 aa, synthetic construct
EVQLLESGGGLVQPGGSLRLSCAASGFTFSMYSMSWVRQAPGKGPEWVSAIDTGGSTRYADSVKGRFTISRDNAKNTLYLQMNSLRPEDTGVYYCARVRGSPYEYNYRGQGTQVTVSS

SEQ ID NO: 1036 - protein, 118 aa, synthetic construct
EVQLLESGGGLAQPGGSLRLSCAASGFTFSMYSMSWVRQAPGKGPEWVSAIDTGGSTRYADSVKGRFTISRDNAKNTLYLQMNSLRPEDTGVYYCARVRGSPYEYNYRGQGTQVTVSS

SEQ ID NO: 1037 - protein, 118 aa, synthetic construct
EVQLLESGGGLVQPGGSLRLSCAASGFTFSMYSMSWVRQAPGKGPEWVSAIDTVDNTRYADSVKGRFTISRDNAKNTLYLQMNSLRPEDTAVYYCARVRGAPYEYNYRGQGTQVTVSS

SEQ ID NO: 1038 - protein, 118 aa, synthetic construct
EVQLLESGGGLVQPGGSLRLSCAASGFNFSMYSMSWVRQAPGKGPEWVSAIDTGGSTRYADSVKGRFTISRDNAKNTLYLQMNSLRPEDTAVYYCARVGGAPYEYNYRGQGTQVTVSS

SEQ ID NO: 1039 - protein, 118 aa, synthetic construct
EVQLLESGGGLVQPGGSLRLSCAASGFTFSMYSMSWVRQAPGKGPEWVSAIDTRGSTRYADSVKGRLTISRDNAKNTLYLQMNSLRPEDTAVYYCARVGGAPYEYNYRGQGTQVTVSS

SEQ ID NO: 1040 - protein, 118 aa, synthetic construct
EVQLLESGGGLVQPGGSLRLSCAASGFNFSMYSMSWVRQAPGKGPEWVSAIDTGGSTRYADSVKGRFTISRDNAKNTLYLQMNSLRPEDTGVYYCARVRGSPYEYNYRGQGTQVTVSS

SEQ ID NO: 1041 - protein, 118 aa, synthetic construct
EVQLLESGGGLVQPGGSLRLSCAASGFNFSMYSMSWVRQAPGKGPEWVSAIDTGGSTRYADSVKGRFTISRDNAKNTLYLQMNSLRPEDTAVYYCARVRGAPYEYGYRGQGTQVTVSS

SEQ ID NO: 1042 - protein, 118 aa, synthetic construct
EVQLLESGGGLVQPGGSLRLSCAASGFNFSMYSMSWVRQAPGKGPEWVSAIDTGGSTRYADSVKGRFTISRDNAKNTLYLQMNSLRPEDTAVYYCARVRGAPYEYNYRGQGTQVTVSS

SEQ ID NO: 1043 - protein, 118 aa, synthetic construct
EVQLLESGGGLVQPGGSLRLSCAASGFTFSMYSMSWVRQAPGKGPEWVSAIDTRGSTRYADSVKGRFTISRDNAKNTLYLQMNSLRPEDTAVYYCARVGGTPYEYGYRGQGTQVTVSS

SEQ ID NO: 1044 - protein, 118 aa, synthetic construct
EVQLLESGGGLVQPGGSLRLSCAASGFNFSMYSMSWVRQAPGKGPEWVSAIDTRGSTRYADSVKGRFTISRDNAKNTLYLQMNSLRPEDTAVYYCARVGGAPYEYNYRGQGTQVTVSS

SEQ ID NO: 1045 - protein, 118 aa, synthetic construct
EVQLLESGGGLVQPGGSLRLSCAASGFNFSMYSMSWVRQAPGKGPEWVSAIDTGGSTRYADSVKGRFTISRDNAKNTLYLQMNSLRPEDTAVYYCARVGGTPYEYGYRGQGTQVTVSS

SEQ ID NO: 1046 - protein, 118 aa, synthetic construct
EVQLLESGGGLVQPGGSLRLSCAASGFTFSKYSMSWVRQAPGKGPEWVSAIDTRGSTRYADSVKGRFTISRDNAKHTLYLQMNSLRPEDTAVYYCARVGGAPYEYNYRGQGTQVTVSS

SEQ ID NO: 1047 - protein, 118 aa, synthetic construct
EVQLLESGGGLVQPGGSLRLSCAASGFTFSMYSMSWVRQAPGKGPEWVSAIDTGGSTRYADSVKGRFTISRDNAKNTLYLQMNSLRPEDTGVYYCARVRGSPYGYNYRGQGTQVTVSS

SEQ ID NO: 1048 - protein, 118 aa, synthetic construct
EVQLLESGGGLVQPGGSLRLSCAASGFTFSMYSMSWVRQAPGKGPEWVSAIDTGGSTRYADSVKGRFTISRDNAKNTLYLQVNSLRPEDTGVYYCARVRGSPYGYNYRGQGTQVTVSS

SEQ ID NO: 1049 - protein, 118 aa, synthetic construct
EVQLLESGGGLVQPGGSLRLSCAASGRTFRSYTMGWFRQAPGKESEFLASIRWTGGSTSYADSVKGRFTISRDNVKETVYLQMNSLRPEDTAVYYCAAAPTGRAFTYWGQGTQVTVSS

SEQ ID NO: 1050 - protein, 118 aa, synthetic construct
EVQLLESGGGLVQPGGSLRLSCAASGHTFGSYTVGWFRQAPGKEREFLASIRWTGGSTSYADSVKGRFTISRDNAKKTVYLQMNSLRPEDTAVYYCTASPTGRAFTYWGQGTQVTVSS

SEQ ID NO: 1051 - protein, 118 aa, synthetic construct
EVQLLESGGGLVQPGGSLRLSCAASGRTFRNYTMGWFRQAPGKEREFLASIRWTGGSTSYADSVKGRFTISRDDAKKTVYLQMNSLRPEDTAVYYCTAAPTGRAFAYWGQGTQVTVSS

SEQ ID NO: 1052 - protein, 118 aa, synthetic construct
EVQLLESGGGLVQPGGSLRLSCAASGRTLRNYTMGWFRQAPGKEREFLASIRWTGGSTSYADSVKGRFTISRDDAKKTVYLQMNSLRPEDTAVYYCTAAPTRRAFAYWGQGTQVTVSS

SEQ ID NO: 1053 - protein, 118 aa, synthetic construct
EVQLLESGGGLVQPGGSLRLSCAASGRTFRSYTMGWFRQAPGKEREFLASIRWTGGSTSYADSVKGRFTISRDDAKKTVYLQMNSLRPEDTAVYYCTAAPTRRAFAYWGQGTQVTVSS

SEQ ID NO: 1054 - protein, 118 aa, synthetic construct
EVQLLESGGGLVQPGGSLRLSCAASGRTFRNYTMGWFRQAPGKEREFLASIRWTGGSTSYADSVKGRFTISRDDAKKTVYLQMNSLRPEDTAVYYCTAAPTRRAFAYWGQGTQVTVSS

SEQ ID NO: 1055 - protein, 118 aa, synthetic construct
EVQLLESGGGLVQPGGSLRLSCAASGRTFSSYTMGWFRQAPGKEHEFVAAIRWATLTTTYADSAKGRFTISRDNAKNTVYLQMNSLRPEDTGVYYCAAAPTGRSFAYWGQGTQVTVSS

SEQ ID NO: 1056 - protein, 118 aa, synthetic construct
EVQLLESGGGLVQPGGSLRLSCAASERTFESDTMGWFRQAPGKEREFLASIRWPGGSTSYADSVKGRFTISRDNAKKTVYLQMNSLRPEDTAVYYCAAAPTGRAFTYEGQGTQVTVSS

SEQ ID NO: 1057 - protein, 118 aa, synthetic construct
EVQLLESGGGLVQPGGSLRLSCAASGRTFRNYTMGWFRQAPGKESEFLASIRWTGGSTSYADSVKGRFTISRDNAKTTVYLQMNSLRPEDTAVYYCAAAPTGRAFTYWGQGTQVTVSS

SEQ ID NO: 1058 - protein, 118 aa, synthetic construct
EVQLLESGGGLVQPGGSLRLSCAASGRTFRNYTMGWFRQAPGKESEFLASIRWTGGSTSYADSVKGRFTISRDNAKKTVYLQMNSLRPEDTAVYYCAAAPTGRAFTYWGQGTQVTVSS

SEQ ID NO: 1059 - protein, 118 aa, synthetic construct
EVQLLESGGGLVQPGGSLRLSCAASGRTFRNYTMGWFRQAPGKEREFLASIRWTGGSTSYADSVKGRFTISRDDAKKTVYLQMNSLRPEDTAVYYCTAAPTVRAFAYWGQGTQVTVSS

SEQ ID NO: 1060 - protein, 118 aa, synthetic construct
EVQLLESGGGLVQPGGSLRLSCAASGHTFGSYTVGWFRQAPGKEREFLASIKWTGGSTSYADSVKGQFTISRDNAKKTVYLQMNSLRPEDTAVYYCTASPTGRAFTYWGQGTQVTVSS

SEQ ID NO: 1061 - protein, 118 aa, synthetic construct
EVQLLESGGGLVQPGGSLRLSCAASGHTFGSYTVGWFRQAPGKEREFLASIRRTGGSTSYADSVKGRFTISRDNAKKTVYLQMNSLRPEDTAVYYCTASPTGRAFTYWGQGTQVTVSS

SEQ ID NO: 1062 - protein, 118 aa, synthetic construct
EVQLLESGGGLVQPGGSLRLSCAASGRTFGNYTMGWFRQAPGKEREFLASIRWTGGSTSYADSVKGRFTISRDDAKKTVYLQMNSLRPEDTAVYYCTAAPTGRAFAYWGQGTQVTVSS

SEQ ID NO: 1063 - protein, 118 aa, synthetic construct
EVQLLESGGGLVQPGGSLRLSCAASGRTFRNYTMGWFRQAPGKEREFLASIRWTGGSTSYADSVKGRFTISRDDAKKTVYLQMNSLRPEDTAVYYCTAAPAGRAFAYWGQGTQVTVSS

SEQ ID NO: 1064 - protein, 118 aa, synthetic construct
EVQLLESGGGLVQPGGSLRLSCAASGRTFRNYTMGWFRQAPGKEREFLASIRRTGGSTSYADSVKGRFTISRDDAKKTVYLQMNSLRPEDTAVYYCTAAPTGRAFAYWGQGTQVTVSS

SEQ ID NO: 1065 - protein, 118 aa, synthetic construct
EVQLLESGGGLVQPGGSLRLSCAASGRTFRNYTMGWFRQAPGKEREFLASIRWTGRSTSYADSVKGRFTISRDDAKKTVYLQMNSLRPEDTAVYYCTAAPTGRAFAYWGQGTQVTVSS

SEQ ID NO: 1066 - protein, 118 aa, synthetic construct
EVQLLESGGGLVQPGGSLRLSCAASGRTFRNYTMGWFRQAPGKEREFLASIRWTGGSTSYADSVKGRFTISRDDAKKTVYLQMNSLRPEDTAVYYCTAAPTGRAFDHRGQGTQVTVSS

SEQ ID NO: 1067 - protein, 118 aa, synthetic construct
EVQLLESGGGLVQPGGSLRLSCAASERTFESDTMGWFRQAPGKEREFLASIRWPGGSTSYADSVKGRFTISRDNAKKTVYLQMNSLRPEDTAVYYCAAAPTGKAFTYEGQGTQVTVSS

SEQ ID NO: 1068 - protein, 118 aa, synthetic construct
EVQLLESGGGLVQPGGSLRLSCAASGRTFSSYFMGWFRQAPGKEREFVASIRYPGLITNYADSAKGRFTISRDSAKNTVYLQMNSLRPEDTGVYYCAAAPTGQAFNIGGQGTQVTVSS

SEQ ID NO: 1069 - protein, 118 aa, synthetic construct
EVQLLESGGGLVQPGGSLRLSCAASGRTFSSYFMGWFRQAPGKEHEFVASIRYPGLITNYADSAKGRFTISRDSAKNTVYLQMNSLRPEDTGVYYCAAAPTGQAFNYWGQGTQVTVSS

SEQ ID NO: 1070 - protein, 118 aa, synthetic construct
EVQLLESGGGLVQPGGSLRLSCAASGRTFSSYFMGWFRQAPGKEHEFVASIRYPGLITNYADSAKGRFTISRDSAKNTVYLQMNSLRPEDTGVYYCAAAPTGKAFNYWGQGTQVTVSS

SEQ ID NO: 1071 - protein, 116 aa, synthetic construct
EVQLVESGGGLVQPGGSLRLSCAASGSIFRFPPMGWYRQAPGKQREEVAQLTSGGSTNYADSVKGRFTISRDNAKNTWYLQMNSLRPEDTAVYYCSVVGRDMVTYWGQGTQVTVSS

SEQ ID NO: 1072 - protein, 116 aa, synthetic construct
EVQLVESGGGLVQPGGSLRLSCAASGNIFRFPPMGWYRQAPGKQREQVAQLTSGGSTNYADSVKGRFTISRDNAKNTWYLQMNSLRPEDTAVYYCSVVGRDMMTYWGQGTQVTVSS

SEQ ID NO: 1073 - protein, 116 aa, synthetic construct
EVQLVESGGGLVQPGGSLRLSCAASGSIFRFPPMGWYRQAPGKQREQVAQLTSGGSTNYADSVKGRFTISRDNAKNTWYLQMNSLRPEDTAVYYCSVLGRDMMTYWGQGTQVTVSS

SEQ ID NO: 1074 - protein, 116 aa, synthetic construct
EVQLVESGGGLVQPGGSLRLSCAASGSIFRFPPMGWYRQAPGKQREQVAQLTSGGSTNYADSVKGRFTISRDNAKNTWYLQMNSLRPEDTAVYYCSMVGRDMMTYWGQGTQVTVSS

SEQ ID NO: 1075 - protein, 116 aa, synthetic construct
EVQLVESGGGLVQPGGSLRLSCAASGSIFRFPPMGWYRQAPGKQREEVAQLTSGGSTNYADSVKGRFTISRDNAKNTWYLQMNSLRPEDTAVYYCSVVGRDMMTYWGQGTQVTVSS

SEQ ID NO: 1076 - protein, 116 aa, synthetic construct
EVQLVESGGGLVQPGGSLRLSCAASGSIFRFPPMGWYRQAPGKQREQVAQLTSGGSTNYADSVKGRFTISRDNAKNTWYLQMNSLRPEDTAVYYCSVIGRDMMTYWGQGTQVTVSS

SEQ ID NO: 1077 - protein, 116 aa, synthetic construct
EVQLVESGGGLVQPGGSLRLSCAASGSIFRFPPMGWYRQAPGKQREQVAQLTSGGSTNYADSVKGRFTISRDNAKNTWYLQMNSLRPEDTAVYYCYMVGRDMMTYWGQGTQVTVSS

SEQ ID NO: 1078 - protein, 116 aa, synthetic construct
EVQLVESGGGLVQPGGSLRLSCAASGSIFRFPPMGWYRQAPGKQREQVAQLTSGGSTNYADSVKGRFTISRDNAKNTWYLQMNSLRPEDTAVYYCSMLGRDMMTYWGQGTQVTVSS

SEQ ID NO: 1079 - protein, 116 aa, synthetic construct
EVQLVESGGGLVQPGGSLRLSCAASGSIFRFPPMGWYRQAPGKQREQVAQLTSGGSTNYADSVKGRFTISRDNAKNTWYLQMNSLRPEDTAVYYCSLVGRDMMTYWGQGTQVTVSS

SEQ ID NO: 1080 - protein, 116 aa, synthetic construct
EVQLVESGGGLVQPGGSLRLSCAASGSIFRFPPMGWYRQAPGKQREQVAQLTSGGSTNYADSVKGRFTISRDNAKNTWYLQMNSLRPEDTAVYYCSVRGRDMMTYWGQGTQVTVSS

SEQ ID NO: 1081 - protein, 116 aa, synthetic construct
EVQLVESGGGLVQPGGSLRLSCAASGSIFRFPPMGWYRQAPGKQREQVAQLTSGGSTNYADSVKGRFTISRDNAKNTWYLQMNSLRPEDTAVYYCSRVGRDMMTYWGQGTQVTVSS

SEQ ID NO: 1082 - protein, 116 aa, synthetic construct
EVQLVESGGGLVQPGGSLRLSCAASGSIFRFPPMGWYRQAPGKQREQVAQLTSGGSTNYADSVKGRFTISRDNAKNTWYLQMNSLRPEDTAVYYCSMVGRDMRTYWGQGTQVTVSS

SEQ ID NO: 1083 - protein, 116 aa, synthetic construct
EVQLVESGGGLVQPGGSLRLSCAASGSIFRFPPMGWYRQAPGKQREQVAQLTSGGSTNYADSVKGRFTISRDNAKNTWYLQMNSLRPEDTAVYYCSALGRDMMTYWGQGTQVTVSS

SEQ ID NO: 1084 - protein, 116 aa, synthetic construct
EVQLVESGGGLVQPGGSLRLSCAASGSIFRFPPMGWYRQAPGKQREQVAQLTSGGSTNYADSVKGRFTISRDNAKNTWYLQMNSLRPEDTAVYYCSMVGRDMMTDWGQGTQVTVSS

SEQ ID NO: 1085 - protein, 116 aa, synthetic construct
EVQLVESGGGLVQPGGSLRLSCAASGSIFRFPPMGWYRQAPGKQREQVAQLTSGGSTNYADSVKGRFTISRDNAKNTWYLQMNSLRPEDTAVYYCSELGRDMMTYWGQGTQVTVSS

SEQ ID NO: 1086 - protein, 116 aa, synthetic construct
EVQLVESGGGLVQPGGSLRLSCAASGSIFRFPPMGWYRQAPGKQREQVAQLTSGGSANYADSVKGRFTISRDNAKNTWYLQMNSLRPEDTAVYYCSMVGRDMMTYWGQGTQVTVSS

SEQ ID NO: 1087 - protein, 116 aa, synthetic construct
EVQLVESGGGLVQPGGSLRLSCAASGSIFRFPPMGWYRQAPGKQREQVAQLTSGGSTNYADSVKGRFTISRDNAKNTWYLQMNSLRPEDTAVYYCSVPGRDMMTYWGQGTQVTVSS

SEQ ID NO: 1088 - protein, 116 aa, synthetic construct
EVQLVESGGGLVQPGGSLRLSCAASGSIFRFPPMGWYRQAPGKQRELVAQLTSGGSTNYADSVKGRFTISRDNAKNTWYLQMNSLRPEDTAVYYCSVVGRDMVTYWGQGTQVTVSS

SEQ ID NO: 1089 - protein, 116 aa, synthetic construct
EVQLVESGGGLVQPGGSLRLSCAASGSIFRFPPMGWYRQAPGKQREQVAQLTSGGSTNYADSVKGRFTISRDNDKNTWYLQMNSLRPEDTAVYYCSVIGRDMMTYWGQGTQVTVSS

SEQ ID NO: 1090 - protein, 116 aa, synthetic construct
EVQLVESGGGLVQPGGSLRLSCAASGSIFRFPPMGWYRQAPGKQREQVAQLTSGGSTNYADSVKGRFTISRDNAKNTWYLQMNSLRPEDTAVYYCSLLGRDMMTYWGQGTQVTVSS

SEQ ID NO: 1091 - protein, 116 aa, synthetic construct
EVQLVESGGGLVQPGGSLRLSCAASGSIFRFPPMGWYRQAPGKQREQVAQLTSGGSTNYADSVKGRFTISRDNAKNTWYLQMNSLRPEDTAVYYCSGLGRDMMTYWGQGTQVTVSS

SEQ ID NO: 1092 - protein, 116 aa, synthetic construct
EVQLVESGGGLVQPGGSLRLSCAASGSIFRFPPMGWYRQAPGKQREQVAQLTSGGSTNYADSVKGRFTISRDNAKNTWYLQMNSLRPEDTAVYYCSMVGRDMLTYWGQGTQVTVSS

SEQ ID NO: 1093 - protein, 116 aa, synthetic construct
EVQLVESGGGLVQPGGSLRLSCAASGSIFRFPPMGWYRQAPGKQREQVAQLTSGGSTNYADSVKGRFTISRDNAKNTWYLQMNSLRPEDTAVYYCSMVGRDLMTYWGQGTQVTVSS

SEQ ID NO: 1094 - protein, 116 aa, synthetic construct
EVQLVESGGGLVQPGGSLRLSCAASGSIFRFPPMGWYRQAPGKQREQVAQLTSGGSTNYADSVKGRFTISRDNAKNTWYLQMNSLRPEDTAVYYCSMGGRDMMTYWGQGTQVTVSS

SEQ ID NO: 1095 - protein, 116 aa, synthetic construct
EVQLVESGGGLVQPGGSLRLSCAASGSIFRFPPMGWYRQAPGKQREQVAQLTSGGSTNYADSVKGRFTISRDNAKNTWYLQMNSLRPEDTAVYYCSIVGRDMMTYWGQGTQVTVSS

SEQ ID NO: 1096 - protein, 116 aa, synthetic construct
EVQLVESGGGLVQPGGSLRLSCAASGSIFRFPPMGWYRQAPGKQREQVAQLTSGGSTNYADSVKGRFTISRDNAKNTWYLQMNSLRPEDTAVYYCSMVVRDMMTYWGQGTQVTVSS

SEQ ID NO: 1097 - protein, 116 aa, synthetic construct
EVQLVESGGGLVQPGGSLRLSCAASGSIFRFPPMGWYRQAPGKQREQVAQLTSGGSTNYADSVKGRFTISRDNAKNTWYLQMNSLRPEDTAVYYCTMVGRDMMTYWGQGTQVTVSS

SEQ ID NO: 1098 - protein, 116 aa, synthetic construct
EVQLVESGGGLVQPGGSLRLSCAASGSIFRFPPMGWYRQAPGKQREQVAQLTSGGSTNYADSVKGRFTISRDNAKNTWYLQMNSLRPEDTAVYYCSMVGSDMMTYWGQGTQVTVSS

SEQ ID NO: 1099 - protein, 116 aa, synthetic construct
EVQLVESGGGLVQPGGSLRLSCAASGSIFRFPPMGWYRQAPGKQREQVAQLTSGGSTNYADSVKGRFTISRDNAKNTWYLQMNSLRPEDTAVYYCSVLGRDKMTYWGQGTQVTVSS

SEQ ID NO: 1100 - protein, 116 aa, synthetic construct
EVQLVESGGGLVQPGGSLRLSCAASGGIFRFPPMGWYRQAPGKQREQVAQLTSGGSTNYADSVKGRFTISRDNAKNTWYLQMNSLRPEDTAVYYCSVLGGDMMTYWGQGTQVTVSS

SEQ ID NO: 1101 - protein, 116 aa, synthetic construct
EVQLVESGGGLVQPGGSLRLSCAASGSIFRFPPMGWYRQAPGKQREQVAQLTSGGSTNYADSVKGRFTISRDNAKNTWYLQMNSLRPEDTAVYYCYVLGRDMMTYWGQGTQVTVSS

SEQ ID NO: 1102 - protein, 116 aa, synthetic construct
EVQLVESGGGLVQPGGSLRLSCAASGSIFRFPPMGWYRQAPGKQREQVAQLTSGGSTNYADSVKGRFTISRDNAKNTWYLQMNSLRPEDTAVYYCSVLGRDMMTDWGQGTQVTVSS

SEQ ID NO: 1103 - protein, 116 aa, synthetic construct
EVQLVESGGGLVQPGGSLRLSCAASGSIFRFPPMGWYRQAPGKQREQVAQLTSGGSTNYADSVKGRFTISRDNAKNTWYLQMNSLRPEDTAVYYCSVLGSDMMTYWGQGTQVTVSS

SEQ ID NO: 1104 - protein, 116 aa, synthetic construct
EVQLVESGGGLVQPGGSLRLSCAASGSIFRFPPMGWYRQAPGKQREQVAQLTSGGSTNYADSVKGRFTISRDNAKNTWYLQMNSLRPEDTAVYYCSVLGGDMMTYWGQGTQVTVSS

SEQ ID NO: 1105 - protein, 116 aa, synthetic construct
EVQLVESGGGLVQPGGSLRLSCAASGSIFRFPPMGWYRQAPGKQREQVAQLTSGGSTNYADSVKGRFTISRDNAKNTWYLQMNSLRPEDTAVYYCSVLGRDMRTYWGQGTQVTVSS

SEQ ID NO: 1106 - protein, 116 aa, synthetic construct
EVQLVESGGGLVQPGGSLRLSCAASGSIFRFPPMGWYRQAPGKQREQVAQLTSGGSTNYADSVKGRFTISRDNAKNTWYLQMNSLRPEDTAVYYCAVLGRDMMTYWGQGTQVTVSS

SEQ ID NO: 1107 - protein, 116 aa, synthetic construct
EVQLVESGGGLVQPGGSLRLSCAASGSIFRFPPMGWYRQAPGKQREQVAQLTSGGSTNYADSVKGRFTISRDNAKNTWYLQMNSLRPEDTAVYYCSVLGRDMLTYWGQGTQVTVSS

SEQ ID NO: 1108 - protein, 116 aa, synthetic construct
EVQLVESGGGLVQPGGSLRLSCAASGSIFRFPPMGWYRQAPGKQREQVAQLTSGGSTNYADSVKGRFTISRDNAKNTWYLQMNSLRPEDTAVYYCSVLGRDLMTYWGQGTQVTVSS

SEQ ID NO: 1109 - protein, 116 aa, synthetic construct
EVQLVESGGGLVQPGGSLRLSCAASGSIFRFPPMGWYRQAPGKQREQVAQLTSGGSTNYADSVKGRFTISRDNAKNTWYLQMNSLRPEDTAVYYCSVLVRDMMTYWGQGTQVTVSS

SEQ ID NO: 1110 - protein, 116 aa, synthetic construct
EVQLVESGGGLVQPGGSLRLSCAASGSIFRFPPMGWYRQAPGKQREQVAQLTSGGSTNYADSVKGRFTISRDNAKNTWYLQMNSLRPEDTAVYYCSVLGRDRMTYWGQGTQVTVSS

SEQ ID NO: 1111 - protein, 116 aa, synthetic construct
EVQLVESGGGLVQPGGSLRLSCAASGSIFRFPPMGWYRQAPGKQREQVAQLTSGGSTNYADSVKGRFTISRDNAKNTWYLQMNSLRPEDTAVYYCSVLGRYMMTYWGQGTQVTVSS

SEQ ID NO: 1112 - protein, 116 aa, synthetic construct
EVQLVESGGGLVQPGGSLRLSCAASGSIFRFPPMGWYRQAPGKQREQVAQLTSGGSTNYADSVKGRFTISRDNAKNTWYLQMNSLRPEDTAVYYCSVLGRDMMTSWGQGTQVTVSS

SEQ ID NO: 1113 - protein, 116 aa, synthetic construct
EVQLVESGGGLVQPGGSLRLSCAASGSIFRFPPMGWYRQAPGKQREQVAQLTSGGSTNYADSVKGRFTISRDNAKNTWYLQMNSLRPEDTAVYYCSVLGRDMMAYWGQGTQVTVSS

SEQ ID NO: 1114 - protein, 116 aa, synthetic construct
EVQLVESGGGLVQPGGSLRLSCAASGSIFRFPPMGWYRQAPGKQREQVAQLTSGGSTNYADSVKGRFTISRDNAKNTWYLQMNSLRPEDTAVYYCSVLGRDMMPYWGQGTQVTVSS

SEQ ID NO: 1115 - protein, 116 aa, synthetic construct
EVQLVESGGGLVQPGGSLRLSCAASGSIFRFPPMGWYRQAPGKQREQVAQLTSGGSTNYADSVKGRFTISRDNAKNTWYLQMNSLRPEDTAVYYCSVLGRDMITYWGQGTQVTVSS

SEQ ID NO: 1116 - protein, 116 aa, synthetic construct
EVQLVESGGGLVQPGGSLRLSCAASGSIFRFPPMGWYRQAPGKQREQVAQLTSGGSTNYADSVKGRFTISRDNAKNTWYLQMNSLRPEDTAVYYCTVLGRDMMTYWGQGTQVTVSS

SEQ ID NO: 1117 - protein, 116 aa, synthetic construct
EVQLVESGGGLVQPGGSLRLSCAASGSTFRFPPMGWYRQAPGKQREQVAQLTSGGSTNYADSVKGRFTISRDNAKNTWYLQMNSLRPEDTAVYYCYVLGRDMMTYWGQGTQVTVSS

SEQ ID NO: 1118 - protein, 116 aa, synthetic construct
EVQLVESGGGLVQPGGSLRLSCAASGSIFRFPPMGWYRQAPGKQREQVAQLTSGGSTNYADSVKGRFTISRDNAKNTWYLQMNSLRPEDTAVYYCSVLGRDMMTHWGQGTQVTVSS

SEQ ID NO: 1119 - protein, 116 aa, synthetic construct
EVQLVESGGGLVQPGGSLRLSCAASGSIFRFPPMGWYRQAPGKQREQVAQLTSGGSTNYADSVKGRFTISRDNAKNTWYLQMNSLRPEDTAVYYCFVLGRDMMTYWGQGTQVTVSS

SEQ ID NO: 1120 - protein, 116 aa, synthetic construct
EVQLVESGGGLVQPGGSLRLSCAASGSTFRFPPMGWYRQAPGKQREQVAQLTSGGSTNYADSVKGRFTISRDNAKNTWYLQMNSLRPEDTAVYYCSVLGRDMRTYWGQGTQVTVSS

SEQ ID NO: 1121 - protein, 116 aa, synthetic construct
EVQLVESGGGLVQPGGSLRLSCAASGSIFRFPPMGWYRQAPGKQREQVAQLTSGGSTNYADSVKGRFTISRDNAKNTWYLQMNSLRPEDTAVYYCSVLGREMMTYWGQGTQVTVSS

SEQ ID NO: 1122 - protein, 116 aa, synthetic construct
EVQLVESGGGLVQPGGSLRLSCAASGSIFRFPPMGWYRQAPGKQREQVAQLTSGGSTNYADSVKGRFTISRDNAKNTWYLQMNSLRPEDTAVYYCSVLGRVMMTYWGQGTQVTVSS

SEQ ID NO: 1123 - protein, 116 aa, synthetic construct
EVQLVESGGGLVQPGGSLRLSCAASGSIFRFPPMGWYRQAPGKQREQVAQLTSGGSTNYADSVKGRFTISRDNAKNTWYLQMNSLRPEDTAVYYCSVLGRDMMSYWGQGTQVTVSS

SEQ ID NO: 1124 - protein, 116 aa, synthetic construct
EVQLVESGGGLVQPGGSLRLSCAASGSIFRFPPMGWYRQAPGKQREQVAQLTSGGSTNYADSVKGRFTISRDNAKNTWYLQMNSLRPEDTAVYYCSVLGRDMMKYWGQGTQVTVSS

SEQ ID NO: 1125 - protein, 116 aa, synthetic construct
EVQLVESGGGLVQPGGSLRLSCAASGSIFRFPPMGWYRQAPGKQREQVAQLTSGGSTNYADSVKGRFTISRDNAKNTWYLQMNSLRPEDTAVYYCSVLGIDMMTYWGQGTQVTVSS

SEQ ID NO: 1126 - protein, 116 aa, synthetic construct
EVQLVESGGGLVQPGGSLRLSCAASGSIFRFPPMGWYRQAPGKQREQVAQLTSGGSTNYADSVKGRFTISRDNAKNTWYLQMNSLRPEDTAVYYCSVLRRDMMTYWGQGTQVTVSS

SEQ ID NO: 1127 - protein, 116 aa, synthetic construct
EVQLVESGGGLVQPGGSLRLSCAASGSIFRFPPMGWYRQAPGKQREQVAQLTSGGSTNYADSVKGRFTISRDNAKNTWYLQMNSLRPEDTAVYYCSVLGRDMVTYWGQGTQVTVSS

SEQ ID NO: 1128 - protein, 8 aa, synthetic construct
GSIFRTDA

SEQ ID NO: 1129 - protein, 8 aa, synthetic construct
GSIVSTKA

SEQ ID NO: 1130 - protein, 8 aa, synthetic construct
GSIFRTDA

SEQ ID NO: 1131 - protein, 8 aa, synthetic construct
GSIFRADA

SEQ ID NO: 1132 - protein, 8 aa, synthetic construct
GSIVSTNG

SEQ ID NO: 1133 - protein, 8 aa, synthetic construct
GSIVSTNG

SEQ ID NO: 1134 - protein, 8 aa, synthetic construct
GSIVSTNG

SEQ ID NO: 1135 - protein, 8 aa, synthetic construct
GSIVSTNG

SEQ ID NO: 1136 - protein, 8 aa, synthetic construct
GSIVSTNS

SEQ ID NO: 1137 - protein, 8 aa, synthetic construct
GSIFSLNG

SEQ ID NO: 1138 - protein, 8 aa, synthetic construct
GNIVSSNS

SEQ ID NO: 1139 - protein, 8 aa, synthetic construct
GSIVSTKA

SEQ ID NO: 1140 - protein, 8 aa, synthetic construct
GSIVSTKA

SEQ ID NO: 1141 - protein, 8 aa, synthetic construct
GSIVSTNS

SEQ ID NO: 1142 - protein, 8 aa, synthetic construct
GSIVSTRA

SEQ ID NO: 1143 - protein, 8 aa, synthetic construct
GSIVSTRA

SEQ ID NO: 1144 - protein, 8 aa, synthetic construct
GSIFSLNG

SEQ ID NO: 1145 - protein, 8 aa, synthetic construct
GSIVSSRS

SEQ ID NO: 1146 - protein, 8 aa, synthetic construct
GSIVSTKA

SEQ ID NO: 1147 - protein, 8 aa, synthetic construct
GSIVSTKA

SEQ ID NO: 1148 - protein, 8 aa, synthetic construct
GSIVSTKA

SEQ ID NO: 1149 - protein, 8 aa, synthetic construct
GSIVSTNA

SEQ ID NO: 1150 - protein, 8 aa, synthetic construct
GSIVSTNA

SEQ ID NO: 1151 - protein, 8 aa, synthetic construct
GSIVSTNS

SEQ ID NO: 1152 - protein, 8 aa, synthetic construct
GSIVSTNS

SEQ ID NO: 1153 - protein, 8 aa, synthetic construct
GSIVSTNS

SEQ ID NO: 1154 - protein, 8 aa, synthetic construct
GSIVSTNS

SEQ ID NO: 1155 - protein, 8 aa, synthetic construct
GSIVSTNS

SEQ ID NO: 1156 - protein, 8 aa, synthetic construct
GSIVSTNS

SEQ ID NO: 1157 - protein, 8 aa, synthetic construct
GSIVSTNS

SEQ ID NO: 1158 - protein, 8 aa, synthetic construct
GSIVSTNS

SEQ ID NO: 1159 - protein, 8 aa, synthetic construct
GSIVSTNS

SEQ ID NO: 1160 - protein, 8 aa, synthetic construct
GSIVSTNS

SEQ ID NO: 1161 - protein, 8 aa, synthetic construct
GSIVSTNS

SEQ ID NO: 1162 - protein, 8 aa, synthetic construct
GSIVSTNS

SEQ ID NO: 1163 - protein, 8 aa, synthetic construct
GSIVSTNS

SEQ ID NO: 1164 - protein, 8 aa, synthetic construct
GSIVSTRA

SEQ ID NO: 1165 - protein, 8 aa, synthetic construct
GSIVSTRA

SEQ ID NO: 1166 - protein, 8 aa, synthetic construct
GNIVSSNS

SEQ ID NO: 1167 - protein, 8 aa, synthetic construct
GSIVSSRS

SEQ ID NO: 1168 - protein, 8 aa, synthetic construct
GSIFRADA

SEQ ID NO: 1169 - protein, 8 aa, synthetic construct
GSIVSTKA

SEQ ID NO: 1170 - protein, 8 aa, synthetic construct
GSIVSTKA

SEQ ID NO: 1171 - protein, 8 aa, synthetic construct
GSIVSTKA

SEQ ID NO: 1172 - protein, 8 aa, synthetic construct
GSIVSTKA

SEQ ID NO: 1173 - protein, 8 aa, synthetic construct
GSIVSTNS

SEQ ID NO: 1174 - protein, 8 aa, synthetic construct
GSIVSTNS

SEQ ID NO: 1175 - protein, 8 aa, synthetic construct
GSIVSTNS

SEQ ID NO: 1176 - protein, 8 aa, synthetic construct
GSIVSTNS

SEQ ID NO: 1177 - protein, 8 aa, synthetic construct
GSIVSTNS

SEQ ID NO: 1178 - protein, 8 aa, synthetic construct
GSIFSTNA

SEQ ID NO: 1179 - protein, 8 aa, synthetic construct
GSIVSTKA

SEQ ID NO: 1180 - protein, 8 aa, synthetic construct
GSIVSTNA

SEQ ID NO: 1181 - protein, 8 aa, synthetic construct
GSIVSTNG

SEQ ID NO: 1182 - protein, 8 aa, synthetic construct
GSIVSTNG

SEQ ID NO: 1183 - protein, 8 aa, synthetic construct
GSIVSTNG

SEQ ID NO: 1184 - protein, 8 aa, synthetic construct
GSIVSTNS

SEQ ID NO: 1185 - protein, 8 aa, synthetic construct
GSIVSTNS

SEQ ID NO: 1186 - protein, 8 aa, synthetic construct
GSIVSTNS

SEQ ID NO: 1187 - protein, 8 aa, synthetic construct
GSIVSTNS

SEQ ID NO: 1188 - protein, 8 aa, synthetic construct
GSIVSTRA

SEQ ID NO: 1189 - protein, 8 aa, synthetic construct
GSIFRTDA

SEQ ID NO: 1190 - protein, 8 aa, synthetic construct
GSIVSSRS

SEQ ID NO: 1191 - protein, 8 aa, synthetic construct
GSIVSSRS

SEQ ID NO: 1192 - protein, 8 aa, synthetic construct
GSIVSTNN

SEQ ID NO: 1193 - protein, 8 aa, synthetic construct
GNIVSSNS

SEQ ID NO: 1194 - protein, 8 aa, synthetic construct
GSIVSTKA

SEQ ID NO: 1195 - protein, 8 aa, synthetic construct
GSIVSTKA

SEQ ID NO: 1196 - protein, 8 aa, synthetic construct
GSIVSTKA

SEQ ID NO: 1197 - protein, 8 aa, synthetic construct
GSIVSTKA

SEQ ID NO: 1198 - protein, 8 aa, synthetic construct
GSIVSTKA

SEQ ID NO: 1199 - protein, 8 aa, synthetic construct
GSIVSTKA

SEQ ID NO: 1200 - protein, 8 aa, synthetic construct
GSIVSTKA

SEQ ID NO: 1201 - protein, 8 aa, synthetic construct
GSIVSTNA

SEQ ID NO: 1202 - protein, 8 aa, synthetic construct
GSIVSTNA

SEQ ID NO: 1203 - protein, 8 aa, synthetic construct
GSIVSTNA

SEQ ID NO: 1204 - protein, 8 aa, synthetic construct
GSIVSTNG

SEQ ID NO: 1205 - protein, 8 aa, synthetic construct
GSIVSTNG

SEQ ID NO: 1206 - protein, 8 aa, synthetic construct
GSIVSTNG

SEQ ID NO: 1207 - protein, 8 aa, synthetic construct
GSIVSTNS

SEQ ID NO: 1208 - protein, 8 aa, synthetic construct
GSIVSTNS

SEQ ID NO: 1209 - protein, 8 aa, synthetic construct
GSIVSTNS

SEQ ID NO: 1210 - protein, 8 aa, synthetic construct
GSIVSTNS

SEQ ID NO: 1211 - protein, 8 aa, synthetic construct
GSIVSTNS

SEQ ID NO: 1212 - protein, 8 aa, synthetic construct
GSIVSTNS

SEQ ID NO: 1213 - protein, 8 aa, synthetic construct
GSIVSTNS

SEQ ID NO: 1214 - protein, 8 aa, synthetic construct
GSIVSTNS

SEQ ID NO: 1215 - protein, 8 aa, synthetic construct
GSIVSTNS

SEQ ID NO: 1216 - protein, 8 aa, synthetic construct
GSIVSTNS

SEQ ID NO: 1217 - protein, 8 aa, synthetic construct
GSIVSTRA

SEQ ID NO: 1218 - protein, 8 aa, synthetic construct
GSIVSTRA

SEQ ID NO: 1219 - protein, 8 aa, synthetic construct
GSIVSTRA

SEQ ID NO: 1220 - protein, 8 aa, synthetic construct
GSIVSTRA

SEQ ID NO: 1221 - protein, 8 aa, synthetic construct
GSIVSTRA

SEQ ID NO: 1222 - protein, 8 aa, synthetic construct
GSIVSTNS

SEQ ID NO: 1223 - protein, 8 aa, synthetic construct
GSIVSSRS

SEQ ID NO: 1224 - protein, 8 aa, synthetic construct
GSIFSLNG

SEQ ID NO: 1225 - protein, 8 aa, synthetic construct
GSIFSLNG

SEQ ID NO: 1226 - protein, 8 aa, synthetic construct
GSIFSLNG

SEQ ID NO: 1227 - protein, 8 aa, synthetic construct
GSIFSFNG

SEQ ID NO: 1228 - protein, 8 aa, synthetic construct
TSIFSANG

SEQ ID NO: 1229 - protein, 8 aa, synthetic construct
GSIFSLNG

SEQ ID NO: 1230 - protein, 8 aa, synthetic construct
GSIFSLNG

SEQ ID NO: 1231 - protein, 8 aa, synthetic construct
GSTFSFNG

SEQ ID NO: 1232 - protein, 8 aa, synthetic construct
GSIFSLNG

SEQ ID NO: 1233 - protein, 8 aa, synthetic construct
GSIFSGNG

SEQ ID NO: 1234 - protein, 8 aa, synthetic construct
GSVFSGNG

SEQ ID NO: 1235 - protein, 8 aa, synthetic construct
GSVFSLNG

SEQ ID NO: 1236 - protein, 8 aa, synthetic construct
GSIFSLNG

SEQ ID NO: 1237 - protein, 8 aa, synthetic construct
GSIFSLNG

SEQ ID NO: 1238 - protein, 8 aa, synthetic construct
GSIFSLNG

SEQ ID NO: 1239 - protein, 8 aa, synthetic construct
GSIFSLNG

SEQ ID NO: 1240 - protein, 8 aa, synthetic construct
GSIFSFNG

SEQ ID NO: 1241 - protein, 8 aa, synthetic construct
GSIFSFNG

SEQ ID NO: 1242 - protein, 8 aa, synthetic construct
GSILSGNG

SEQ ID NO: 1243 - protein, 8 aa, synthetic construct
GSIFSLNG

SEQ ID NO: 1244 - protein, 8 aa, synthetic construct
GSIFSLNG

SEQ ID NO: 1245 - protein, 8 aa, synthetic construct
GSIFSLNG

SEQ ID NO: 1246 - protein, 8 aa, synthetic construct
GSIFSLNG

SEQ ID NO: 1247 - protein, 8 aa, synthetic construct
GSIFSLNG

SEQ ID NO: 1248 - protein, 8 aa, synthetic construct
GSIFSLNG

SEQ ID NO: 1249 - protein, 8 aa, synthetic construct
GSIFSFNG

SEQ ID NO: 1250 - protein, 8 aa, synthetic construct
GSIFSLNA

SEQ ID NO: 1251 - protein, 8 aa, synthetic construct
GVTFNINA

SEQ ID NO: 1252 - protein, 8 aa, synthetic construct
GSIFSLNG

SEQ ID NO: 1253 - protein, 8 aa, synthetic construct
GSIFSLNG

SEQ ID NO: 1254 - protein, 8 aa, synthetic construct
GSIFSLNG

SEQ ID NO: 1255 - protein, 8 aa, synthetic construct
GSIVSTNG

SEQ ID NO: 1256 - protein, 8 aa, synthetic construct
GFRFGDYA

SEQ ID NO: 1257 - protein, 8 aa, synthetic construct
GSIVSTNG

SEQ ID NO: 1258 - protein, 8 aa, synthetic construct
GSIVSTSA

SEQ ID NO: 1259 - protein, 8 aa, synthetic construct
GSIVSTNA

SEQ ID NO: 1260 - protein, 8 aa, synthetic construct
GSIVSTNG

SEQ ID NO: 1261 - protein, 8 aa, synthetic construct
GSIVSTSA

SEQ ID NO: 1262 - protein, 8 aa, synthetic construct
GSIVSTNA

SEQ ID NO: 1263 - protein, 8 aa, synthetic construct
GSIVSTNA

SEQ ID NO: 1264 - protein, 8 aa, synthetic construct
GSIVSTNA

SEQ ID NO: 1265 - protein, 8 aa, synthetic construct
GSIVSTNA

SEQ ID NO: 1266 - protein, 8 aa, synthetic construct
GSIVSTNG

SEQ ID NO: 1267 - protein, 8 aa, synthetic construct
GSIVSTNA

SEQ ID NO: 1268 - protein, 8 aa, synthetic construct
GSIVSTNG

SEQ ID NO: 1269 - protein, 8 aa, synthetic construct
GSIVSTNG

SEQ ID NO: 1270 - protein, 8 aa, synthetic construct
GSIVSTNS

SEQ ID NO: 1271 - protein, 8 aa, synthetic construct
GSIVGTNA

SEQ ID NO: 1272 - protein, 8 aa, synthetic construct
GSIVSTNN

SEQ ID NO: 1273 - protein, 8 aa, synthetic construct
GSIVSTNA

SEQ ID NO: 1274 - protein, 8 aa, synthetic construct
GSIVSTNA

SEQ ID NO: 1275 - protein, 8 aa, synthetic construct
GSIVSTNA

SEQ ID NO: 1276 - protein, 8 aa, synthetic construct
GSIVSTNA

SEQ ID NO: 1277 - protein, 8 aa, synthetic construct
GSIVSTNA

SEQ ID NO: 1278 - protein, 8 aa, synthetic construct
GSIVSTNS

SEQ ID NO: 1279 - protein, 8 aa, synthetic construct
GSIVSTNN

SEQ ID NO: 1280 - protein, 8 aa, synthetic construct
GSIVSTNA

SEQ ID NO: 1281 - protein, 8 aa, synthetic construct
GSIVSTNA

SEQ ID NO: 1282 - protein, 8 aa, synthetic construct
GSIVSTNA

SEQ ID NO: 1283 - protein, 8 aa, synthetic construct
GSIVSTNA

SEQ ID NO: 1284 - protein, 8 aa, synthetic construct
GSIVSTNA

SEQ ID NO: 1285 - protein, 8 aa, synthetic construct
GSIVSTNA

SEQ ID NO: 1286 - protein, 8 aa, synthetic construct
GSIVSTNS

SEQ ID NO: 1287 - protein, 8 aa, synthetic construct
GSIVSTNS

SEQ ID NO: 1288 - protein, 8 aa, synthetic construct
GSIVSTNN

SEQ ID NO: 1289 - protein, 8 aa, synthetic construct
GSIVSTNA

SEQ ID NO: 1290 - protein, 8 aa, synthetic construct
GSIVSTNA

SEQ ID NO: 1291 - protein, 8 aa, synthetic construct
GSIVSTNA

SEQ ID NO: 1292 - protein, 8 aa, synthetic construct
GSIVSTNA

SEQ ID NO: 1293 - protein, 8 aa, synthetic construct
GSIVSTNG

SEQ ID NO: 1294 - protein, 8 aa, synthetic construct
GSIVGTNA

SEQ ID NO: 1295 - protein, 8 aa, synthetic construct
GSIVSTNA

SEQ ID NO: 1296 - protein, 8 aa, synthetic construct
GSIVSTNA

SEQ ID NO: 1297 - protein, 8 aa, synthetic construct
GSIVSTNA

SEQ ID NO: 1298 - protein, 8 aa, synthetic construct
GSIVSTNA

SEQ ID NO: 1299 - protein, 8 aa, synthetic construct
GSIVSTNA

SEQ ID NO: 1300 - protein, 8 aa, synthetic construct
GSIVSTNG

SEQ ID NO: 1301 - protein, 8 aa, synthetic construct
GSIVSTNG

SEQ ID NO: 1302 - protein, 8 aa, synthetic construct
GSIVSTNS

SEQ ID NO: 1303 - protein, 8 aa, synthetic construct
GSIVSTNS

SEQ ID NO: 1304 - protein, 8 aa, synthetic construct
GSIVSTNS

SEQ ID NO: 1305 - protein, 8 aa, synthetic construct
GSIVSTNS

SEQ ID NO: 1306 - protein, 8 aa, synthetic construct
GSIFSLNG

SEQ ID NO: 1307 - protein, 8 aa, synthetic construct
GSIFSFNG

SEQ ID NO: 1308 - protein, 8 aa, synthetic construct
GSISSFNG

SEQ ID NO: 1309 - protein, 8 aa, synthetic construct
GSIFSLNG

SEQ ID NO: 1310 - protein, 8 aa, synthetic construct
GSISSFNG

SEQ ID NO: 1311 - protein, 8 aa, synthetic construct
GSIRNING

SEQ ID NO: 1312 - protein, 8 aa, synthetic construct
GSIFSFNA

SEQ ID NO: 1313 - protein, 8 aa, synthetic construct
GSIFSFNA

SEQ ID NO: 1314 - protein, 8 aa, synthetic construct
GSIFSFNA

SEQ ID NO: 1315 - protein, 8 aa, synthetic construct
GSIVSTNG

SEQ ID NO: 1316 - protein, 8 aa, synthetic construct
GSIVSTNS

SEQ ID NO: 1317 - protein, 8 aa, synthetic construct
GSIFSFNA

SEQ ID NO: 1318 - protein, 8 aa, synthetic construct
GSIFRADA

SEQ ID NO: 1319 - protein, 8 aa, synthetic construct
GSIFRADA

SEQ ID NO: 1320 - protein, 8 aa, synthetic construct
GSIFSLNG

SEQ ID NO: 1321 - protein, 8 aa, synthetic construct
GSIFSFNA

SEQ ID NO: 1322 - protein, 8 aa, synthetic construct
GSIFSGNA

SEQ ID NO: 1323 - protein, 8 aa, synthetic construct
GSIRNING

SEQ ID NO: 1324 - protein, 8 aa, synthetic construct
GSIFRTDA

SEQ ID NO: 1325 - protein, 8 aa, synthetic construct
GSIVSTNG

SEQ ID NO: 1326 - protein, 8 aa, synthetic construct
GSIFSFNG

SEQ ID NO: 1327 - protein, 8 aa, synthetic construct
GSINSSNG

SEQ ID NO: 1328 - protein, 8 aa, synthetic construct
GSIFSFNA

SEQ ID NO: 1329 - protein, 8 aa, synthetic construct
GSIFSFNA

SEQ ID NO: 1330 - protein, 8 aa, synthetic construct
GSIFSFNA

SEQ ID NO: 1331 - protein, 8 aa, synthetic construct
GSIFSFNA

SEQ ID NO: 1332 - protein, 8 aa, synthetic construct
GSIFSFNA

SEQ ID NO: 1333 - protein, 8 aa, synthetic construct
GSIFSFNA

SEQ ID NO: 1334 - protein, 8 aa, synthetic construct
GGIFSGNA

SEQ ID NO: 1335 - protein, 8 aa, synthetic construct
GSISSFNG

SEQ ID NO: 1336 - protein, 8 aa, synthetic construct
GSIRNING

SEQ ID NO: 1337 - protein, 8 aa, synthetic construct
GSIFSANG

SEQ ID NO: 1338 - protein, 8 aa, synthetic construct
GSIVSTNG

SEQ ID NO: 1339 - protein, 8 aa, synthetic construct
GSIVSTNG

SEQ ID NO: 1340 - protein, 8 aa, synthetic construct
GSIVSTNG

SEQ ID NO: 1341 - protein, 8 aa, synthetic construct
GSIVSTNG

SEQ ID NO: 1342 - protein, 8 aa, synthetic construct
GSIVSTNG

SEQ ID NO: 1343 - protein, 8 aa, synthetic construct
GSIVSTNG

SEQ ID NO: 1344 - protein, 8 aa, synthetic construct
GSIVSTNG

SEQ ID NO: 1345 - protein, 8 aa, synthetic construct
GSIVSTNG

SEQ ID NO: 1346 - protein, 8 aa, synthetic construct
GSIVSTNG

SEQ ID NO: 1347 - protein, 8 aa, synthetic construct
GSIVSTNG

SEQ ID NO: 1348 - protein, 8 aa, synthetic construct
GRRFSSNA

SEQ ID NO: 1349 - protein, 8 aa, synthetic construct
GRRFSSNA

SEQ ID NO: 1350 - protein, 8 aa, synthetic construct
GSIVSTNG

SEQ ID NO: 1351 - protein, 8 aa, synthetic construct
GSIVSTNG

SEQ ID NO: 1352 - protein, 8 aa, synthetic construct
GSIVSTNS

SEQ ID NO: 1353 - protein, 8 aa, synthetic construct
GSIFSLNG

SEQ ID NO: 1354 - protein, 8 aa, synthetic construct
GRRFSANA

SEQ ID NO: 1355 - protein, 8 aa, synthetic construct
GSIVSTNG

SEQ ID NO: 1356 - protein, 8 aa, synthetic construct
GSIVSTNG

SEQ ID NO: 1357 - protein, 8 aa, synthetic construct
GSIVSTNG

SEQ ID NO: 1358 - protein, 8 aa, synthetic construct
GSIVSTNG

SEQ ID NO: 1359 - protein, 8 aa, synthetic construct
GSIVSTNG

SEQ ID NO: 1360 - protein, 8 aa, synthetic construct
GSIVSTNG

SEQ ID NO: 1361 - protein, 8 aa, synthetic construct
GSIVSTNG

SEQ ID NO: 1362 - protein, 8 aa, synthetic construct
GSIVSTNS

SEQ ID NO: 1363 - protein, 8 aa, synthetic construct
GSIVSTNS

SEQ ID NO: 1364 - protein, 8 aa, synthetic construct
GRRFSANA

SEQ ID NO: 1365 - protein, 8 aa, synthetic construct
GRRFSANA

SEQ ID NO: 1366 - protein, 8 aa, synthetic construct
GRRFSSNA

SEQ ID NO: 1367 - protein, 8 aa, synthetic construct
GSIVSTKA

SEQ ID NO: 1368 - protein, 8 aa, synthetic construct
GSIVSTNA

SEQ ID NO: 1369 - protein, 8 aa, synthetic construct
GSIVSTNG

SEQ ID NO: 1370 - protein, 8 aa, synthetic construct
GSIVSTNG

SEQ ID NO: 1371 - protein, 8 aa, synthetic construct
GSIVSTNG

SEQ ID NO: 1372 - protein, 8 aa, synthetic construct
GSIVSTNG

SEQ ID NO: 1373 - protein, 8 aa, synthetic construct
GSIVSTNG

SEQ ID NO: 1374 - protein, 8 aa, synthetic construct
GSIVSTNG

SEQ ID NO: 1375 - protein, 8 aa, synthetic construct
GSIVSTNG

SEQ ID NO: 1376 - protein, 8 aa, synthetic construct
GSIVSTNG

SEQ ID NO: 1377 - protein, 8 aa, synthetic construct
GSIVSTNG

SEQ ID NO: 1378 - protein, 8 aa, synthetic construct
GSIVSTNG

SEQ ID NO: 1379 - protein, 8 aa, synthetic construct
GSIVSTNG

SEQ ID NO: 1380 - protein, 8 aa, synthetic construct
GSIVSTNG

SEQ ID NO: 1381 - protein, 8 aa, synthetic construct
GSIVSTNG

SEQ ID NO: 1382 - protein, 8 aa, synthetic construct
GSIVSTNG

SEQ ID NO: 1383 - protein, 8 aa, synthetic construct
GSIVSTNG

SEQ ID NO: 1384 - protein, 8 aa, synthetic construct
GSIVSTNS

SEQ ID NO: 1385 - protein, 8 aa, synthetic construct
GSIVSTNS

SEQ ID NO: 1386 - protein, 8 aa, synthetic construct
GRRFSANA

SEQ ID NO: 1387 - protein, 8 aa, synthetic construct
GRRFSTNA

SEQ ID NO: 1388 - protein, 8 aa, synthetic construct
GRRFSANA

SEQ ID NO: 1389 - protein, 8 aa, synthetic construct
GSIVSTNG

SEQ ID NO: 1390 - protein, 8 aa, synthetic construct
GSIVSTNG

SEQ ID NO: 1391 - protein, 8 aa, synthetic construct
GSIVSTNG

SEQ ID NO: 1392 - protein, 8 aa, synthetic construct
GSIVSTNG

SEQ ID NO: 1393 - protein, 8 aa, synthetic construct
GSIVSTNG

SEQ ID NO: 1394 - protein, 8 aa, synthetic construct
GSIVSTNG

SEQ ID NO: 1395 - protein, 8 aa, synthetic construct
GSIVSTNG

SEQ ID NO: 1396 - protein, 8 aa, synthetic construct
GSIVSTNG

SEQ ID NO: 1397 - protein, 8 aa, synthetic construct
GSIVSTNG

SEQ ID NO: 1398 - protein, 8 aa, synthetic construct
GSIVSTNG

SEQ ID NO: 1399 - protein, 8 aa, synthetic construct
GSIVSTNG

SEQ ID NO: 1400 - protein, 8 aa, synthetic construct
GSIVSTNG

SEQ ID NO: 1401 - protein, 8 aa, synthetic construct
GSIFRADA

SEQ ID NO: 1402 - protein, 8 aa, synthetic construct
GSIFRTDA

SEQ ID NO: 1403 - protein, 8 aa, synthetic construct
GSIFRADA

SEQ ID NO: 1404 - protein, 8 aa, synthetic construct
GSIFRADA

SEQ ID NO: 1405 - protein, 8 aa, synthetic construct
GSIFRADA

SEQ ID NO: 1406 - protein, 8 aa, synthetic construct
GSIFSLNG

SEQ ID NO: 1407 - protein, 8 aa, synthetic construct
GSIVSTNG

SEQ ID NO: 1408 - protein, 8 aa, synthetic construct
GSIVSTNG

SEQ ID NO: 1409 - protein, 8 aa, synthetic construct
GSIVSTNG

SEQ ID NO: 1410 - protein, 8 aa, synthetic construct
GSIVSTNG

SEQ ID NO: 1411 - protein, 8 aa, synthetic construct
GSIVSTNG

SEQ ID NO: 1412 - protein, 8 aa, synthetic construct
GSIFRADA

SEQ ID NO: 1413 - protein, 8 aa, synthetic construct
GSIVSTNG

SEQ ID NO: 1414 - protein, 8 aa, synthetic construct
GSIVSTNG

SEQ ID NO: 1415 - protein, 8 aa, synthetic construct
GSIVSTNG

SEQ ID NO: 1416 - protein, 8 aa, synthetic construct
GSIVSTNG

SEQ ID NO: 1417 - protein, 8 aa, synthetic construct
GSIVSTNG

SEQ ID NO: 1418 - protein, 8 aa, synthetic construct
GSIVSTNG

SEQ ID NO: 1419 - protein, 8 aa, synthetic construct
GSIVSTNG

SEQ ID NO: 1420 - protein, 8 aa, synthetic construct
GSIVSTNG

SEQ ID NO: 1421 - protein, 8 aa, synthetic construct
GSIVSTNG

SEQ ID NO: 1422 - protein, 8 aa, synthetic construct
GSIVSTNG

SEQ ID NO: 1423 - protein, 8 aa, synthetic construct
GSIFSLNG

SEQ ID NO: 1424 - protein, 8 aa, synthetic construct
GSIFSLNG

SEQ ID NO: 1425 - protein, 8 aa, synthetic construct
GSIFSLNG

SEQ ID NO: 1426 - protein, 8 aa, synthetic construct
GSIFSLNA

SEQ ID NO: 1427 - protein, 8 aa, synthetic construct
GSIFSLNG

SEQ ID NO: 1428 - protein, 8 aa, synthetic construct
GSIFSLNG

SEQ ID NO: 1429 - protein, 8 aa, synthetic construct
GFTFDDIA

SEQ ID NO: 1430 - protein, 8 aa, synthetic construct
GFTFDGIA

SEQ ID NO: 1431 - protein, 8 aa, synthetic construct
GFTFDDIA

SEQ ID NO: 1432 - protein, 8 aa, synthetic construct
GFTFDDIA

SEQ ID NO: 1433 - protein, 8 aa, synthetic construct
GFTFDDIA

SEQ ID NO: 1434 - protein, 8 aa, synthetic construct
GFTFDDIA

SEQ ID NO: 1435 - protein, 8 aa, synthetic construct
GFTFDDIA

SEQ ID NO: 1436 - protein, 8 aa, synthetic construct
GFTFDDIA

SEQ ID NO: 1437 - protein, 8 aa, synthetic construct
GFTLDDYA

SEQ ID NO: 1438 - protein, 8 aa, synthetic construct
GFTLDDYA

SEQ ID NO: 1439 - protein, 8 aa, synthetic construct
GFTFSGYA

SEQ ID NO: 1440 - protein, 8 aa, synthetic construct
GFTFSSYA

SEQ ID NO: 1441 - protein, 8 aa, synthetic construct
GFTFSRYA

SEQ ID NO: 1442 - protein, 8 aa, synthetic construct
GFTFSSYA

SEQ ID NO: 1443 - protein, 8 aa, synthetic construct
GFTFSGYA

SEQ ID NO: 1444 - protein, 8 aa, synthetic construct
GFTFSGYA

SEQ ID NO: 1445 - protein, 8 aa, synthetic construct
GFTFSGYA

SEQ ID NO: 1446 - protein, 8 aa, synthetic construct
GFTFSGYA

SEQ ID NO: 1447 - protein, 8 aa, synthetic construct
GFTFSRYA

SEQ ID NO: 1448 - protein, 8 aa, synthetic construct
GFTFSSYA

SEQ ID NO: 1449 - protein, 8 aa, synthetic construct
GFTFSSYA

SEQ ID NO: 1450 - protein, 8 aa, synthetic construct
GRTFSDYG

SEQ ID NO: 1451 - protein, 8 aa, synthetic construct
GRTFSDYG

SEQ ID NO: 1452 - protein, 8 aa, synthetic construct
GRTFSDYG

SEQ ID NO: 1453 - protein, 8 aa, synthetic construct
GRTFSDYG

SEQ ID NO: 1454 - protein, 8 aa, synthetic construct
GRTFSDYG

SEQ ID NO: 1455 - protein, 8 aa, synthetic construct
GRTFSDYG

SEQ ID NO: 1456 - protein, 8 aa, synthetic construct
GRTFSDYG

SEQ ID NO: 1457 - protein, 8 aa, synthetic construct
GRTFSDYG

SEQ ID NO: 1458 - protein, 8 aa, synthetic construct
GRTFSDYG

SEQ ID NO: 1459 - protein, 8 aa, synthetic construct
GRTFSDYG

SEQ ID NO: 1460 - protein, 8 aa, synthetic construct
GRTFSDYG

SEQ ID NO: 1461 - protein, 8 aa, synthetic construct
GRTFSDYG

SEQ ID NO: 1462 - protein, 8 aa, synthetic construct
GRTFSDYG

SEQ ID NO: 1463 - protein, 8 aa, synthetic construct
GRTFSDYG

SEQ ID NO: 1464 - protein, 8 aa, synthetic construct
GRTFSDYG

SEQ ID NO: 1465 - protein, 8 aa, synthetic construct
GRTFSDYG

SEQ ID NO: 1466 - protein, 8 aa, synthetic construct
GRTFSDYG

SEQ ID NO: 1467 - protein, 8 aa, synthetic construct
GRTFSDYG

SEQ ID NO: 1468 - protein, 8 aa, synthetic construct
GRTFSDYG

SEQ ID NO: 1469 - protein, 8 aa, synthetic construct
GRTFSDYG

SEQ ID NO: 1470 - protein, 8 aa, synthetic construct
GRTFSDYG

SEQ ID NO: 1471 - protein, 8 aa, synthetic construct
GRTFSDYG

SEQ ID NO: 1472 - protein, 8 aa, synthetic construct
GRTFSDYG

SEQ ID NO: 1473 - protein, 8 aa, synthetic construct
GRTFSDYG

SEQ ID NO: 1474 - protein, 8 aa, synthetic construct
GRTFSDYG

SEQ ID NO: 1475 - protein, 8 aa, synthetic construct
GRTFSDYG

SEQ ID NO: 1476 - protein, 8 aa, synthetic construct
GRTFSDYG

SEQ ID NO: 1477 - protein, 8 aa, synthetic construct
GRTFSDYG

SEQ ID NO: 1478 - protein, 8 aa, synthetic construct
GRTFSDYG

SEQ ID NO: 1479 - protein, 8 aa, synthetic construct
GRTFSDYG

SEQ ID NO: 1480 - protein, 8 aa, synthetic construct
GRTFSDYG

SEQ ID NO: 1481 - protein, 8 aa, synthetic construct
GRTFSDYG

SEQ ID NO: 1482 - protein, 8 aa, synthetic construct
GRTFSDYG

SEQ ID NO: 1483 - protein, 8 aa, synthetic construct
GRTFSDYG

SEQ ID NO: 1484 - protein, 8 aa, synthetic construct
GRTFSDYG

SEQ ID NO: 1485 - protein, 8 aa, synthetic construct
GRTFSDYG

SEQ ID NO: 1486 - protein, 8 aa, synthetic construct
GRTFSDYG

SEQ ID NO: 1487 - protein, 8 aa, synthetic construct
GRTFSDYG

SEQ ID NO: 1488 - protein, 8 aa, synthetic construct
GRTFSDYG

SEQ ID NO: 1489 - protein, 8 aa, synthetic construct
GRTFSDYG

SEQ ID NO: 1490 - protein, 8 aa, synthetic construct
GRTFSDYG

SEQ ID NO: 1491 - protein, 8 aa, synthetic construct
GRTFSDYG

SEQ ID NO: 1492 - protein, 8 aa, synthetic construct
GRTFSDYG

SEQ ID NO: 1493 - protein, 8 aa, synthetic construct
GRTFSDYG

SEQ ID NO: 1494 - protein, 8 aa, synthetic construct
GRTFSDYG

SEQ ID NO: 1495 - protein, 8 aa, synthetic construct
GRTFSDYG

SEQ ID NO: 1496 - protein, 8 aa, synthetic construct
GRTFSDYG

SEQ ID NO: 1497 - protein, 8 aa, synthetic construct
GRTFSDYG

SEQ ID NO: 1498 - protein, 8 aa, synthetic construct
GRTFSDYG

SEQ ID NO: 1499 - protein, 8 aa, synthetic construct
GRTFSDYG

SEQ ID NO: 1500 - protein, 8 aa, synthetic construct
GRTFSDYG

SEQ ID NO: 1501 - protein, 8 aa, synthetic construct
GRTFSDYG

SEQ ID NO: 1502 - protein, 8 aa, synthetic construct
GRTFSSYY

SEQ ID NO: 1503 - protein, 8 aa, synthetic construct
GRTFSDYG

SEQ ID NO: 1504 - protein, 8 aa, synthetic construct
GRTFSDYG

SEQ ID NO: 1505 - protein, 8 aa, synthetic construct
GRTFSDYG

SEQ ID NO: 1506 - protein, 8 aa, synthetic construct
GRTFSDYG

SEQ ID NO: 1507 - protein, 8 aa, synthetic construct
GRTFSDYG

SEQ ID NO: 1508 - protein, 8 aa, synthetic construct
GRTFSDYG

SEQ ID NO: 1509 - protein, 8 aa, synthetic construct
GRTFSDYG

SEQ ID NO: 1510 - protein, 8 aa, synthetic construct
GRTFSDYG

SEQ ID NO: 1511 - protein, 8 aa, synthetic construct
GRTFSDYG

SEQ ID NO: 1512 - protein, 8 aa, synthetic construct
GRTFSDYG

SEQ ID NO: 1513 - protein, 8 aa, synthetic construct
GRTFSDYG

SEQ ID NO: 1514 - protein, 8 aa, synthetic construct
GRTFSDYG

SEQ ID NO: 1515 - protein, 8 aa, synthetic construct
GRTFSDYG

SEQ ID NO: 1516 - protein, 8 aa, synthetic construct
GRTFSDYG

SEQ ID NO: 1517 - protein, 8 aa, synthetic construct
GRTFSDYG

SEQ ID NO: 1518 - protein, 8 aa, synthetic construct
GRTFSDYG

SEQ ID NO: 1519 - protein, 8 aa, synthetic construct
GRTFSDYG

SEQ ID NO: 1520 - protein, 8 aa, synthetic construct
GRTFSDYG

SEQ ID NO: 1521 - protein, 8 aa, synthetic construct
GRTFSDYG

SEQ ID NO: 1522 - protein, 8 aa, synthetic construct
GRTFSDYG

SEQ ID NO: 1523 - protein, 8 aa, synthetic construct
GRTFSDYG

SEQ ID NO: 1524 - protein, 8 aa, synthetic construct
GRTFSDYG

SEQ ID NO: 1525 - protein, 8 aa, synthetic construct
GRTFSDYG

SEQ ID NO: 1526 - protein, 8 aa, synthetic construct
GRTFSDYG

SEQ ID NO: 1527 - protein, 8 aa, synthetic construct
GRTFSDYG

SEQ ID NO: 1528 - protein, 8 aa, synthetic construct
GRTFGNYT

SEQ ID NO: 1529 - protein, 8 aa, synthetic construct
GLTLDYYA

SEQ ID NO: 1530 - protein, 8 aa, synthetic construct
GFTLDYYA

SEQ ID NO: 1531 - protein, 8 aa, synthetic construct
GFTLDYYA

SEQ ID NO: 1532 - protein, 8 aa, synthetic construct
GFNFSMYS

SEQ ID NO: 1533 - protein, 8 aa, synthetic construct
GFNFSMYS

SEQ ID NO: 1534 - protein, 8 aa, synthetic construct
GFNFSMYS

SEQ ID NO: 1535 - protein, 8 aa, synthetic construct
GFNFSMYS

SEQ ID NO: 1536 - protein, 8 aa, synthetic construct
GFNFSMYS

SEQ ID NO: 1537 - protein, 8 aa, synthetic construct
GFNFSMYS

SEQ ID NO: 1538 - protein, 8 aa, synthetic construct
GFNFSMYS

SEQ ID NO: 1539 - protein, 8 aa, synthetic construct
GFNFSMYS

SEQ ID NO: 1540 - protein, 8 aa, synthetic construct
GFNFSMYS

SEQ ID NO: 1541 - protein, 8 aa, synthetic construct
GFNFSMYS

SEQ ID NO: 1542 - protein, 8 aa, synthetic construct
GFNFSMYS

SEQ ID NO: 1543 - protein, 8 aa, synthetic construct
GFNFSMYS

SEQ ID NO: 1544 - protein, 8 aa, synthetic construct
GFNFSMYS

SEQ ID NO: 1545 - protein, 8 aa, synthetic construct
GFNFSMYS

SEQ ID NO: 1546 - protein, 8 aa, synthetic construct
GFNFSMYS

SEQ ID NO: 1547 - protein, 8 aa, synthetic construct
GFNFSMYS

SEQ ID NO: 1548 - protein, 8 aa, synthetic construct
GFNFSMYS

SEQ ID NO: 1549 - protein, 8 aa, synthetic construct
GFNFSMYS

SEQ ID NO: 1550 - protein, 8 aa, synthetic construct
GFNFSMYS

SEQ ID NO: 1551 - protein, 8 aa, synthetic construct
GFNFSMYS

SEQ ID NO: 1552 - protein, 8 aa, synthetic construct
GFNFSMYS

SEQ ID NO: 1553 - protein, 8 aa, synthetic construct
GFNFSMYS

SEQ ID NO: 1554 - protein, 8 aa, synthetic construct
GFNFSMYS

SEQ ID NO: 1555 - protein, 8 aa, synthetic construct
GFNFSMYS

SEQ ID NO: 1556 - protein, 8 aa, synthetic construct
GFNFSMYS

SEQ ID NO: 1557 - protein, 8 aa, synthetic construct
GFTFDDIA

SEQ ID NO: 1558 - protein, 8 aa, synthetic construct
GFNFSMYS

SEQ ID NO: 1559 - protein, 8 aa, synthetic construct
GFNFSMYS

SEQ ID NO: 1560 - protein, 8 aa, synthetic construct
GFNFSMYS

SEQ ID NO: 1561 - protein, 8 aa, synthetic construct
GFNFSMYS

SEQ ID NO: 1562 - protein, 8 aa, synthetic construct
GFNFSMYS

SEQ ID NO: 1563 - protein, 8 aa, synthetic construct
GFTFSMYS

SEQ ID NO: 1564 - protein, 8 aa, synthetic construct
GFTFSMYS

SEQ ID NO: 1565 - protein, 8 aa, synthetic construct
GFTFSMYS

SEQ ID NO: 1566 - protein, 8 aa, synthetic construct
GFTFSMYS

SEQ ID NO: 1567 - protein, 8 aa, synthetic construct
GFTFSMYS

SEQ ID NO: 1568 - protein, 8 aa, synthetic construct
GFTFSMYS

SEQ ID NO: 1569 - protein, 8 aa, synthetic construct
GFNFSMYS

SEQ ID NO: 1570 - protein, 8 aa, synthetic construct
GFTFSMYS

SEQ ID NO: 1571 - protein, 8 aa, synthetic construct
GFNFSMYS

SEQ ID NO: 1572 - protein, 8 aa, synthetic construct
GFNFSMYS

SEQ ID NO: 1573 - protein, 8 aa, synthetic construct
GFNFSMYS

SEQ ID NO: 1574 - protein, 8 aa, synthetic construct
GFTFSMYS

SEQ ID NO: 1575 - protein, 8 aa, synthetic construct
GFNFSMYS

SEQ ID NO: 1576 - protein, 8 aa, synthetic construct
GFNFSMYS

SEQ ID NO: 1577 - protein, 8 aa, synthetic construct
GFTFSKYS

SEQ ID NO: 1578 - protein, 8 aa, synthetic construct
GFTFSMYS

SEQ ID NO: 1579 - protein, 8 aa, synthetic construct
GFTFSMYS

SEQ ID NO: 1580 - protein, 8 aa, synthetic construct
GFTFSMYS

SEQ ID NO: 1581 - protein, 8 aa, synthetic construct
GFTFSMYS

SEQ ID NO: 1582 - protein, 8 aa, synthetic construct
GRTFRSYT

SEQ ID NO: 1583 - protein, 8 aa, synthetic construct
GHTFGSYT

SEQ ID NO: 1584 - protein, 8 aa, synthetic construct
GRTFRNYT

SEQ ID NO: 1585 - protein, 8 aa, synthetic construct
GRTFRNYT

SEQ ID NO: 1586 - protein, 8 aa, synthetic construct
GHTFGSYT

SEQ ID NO: 1587 - protein, 8 aa, synthetic construct
GRTLRNYT

SEQ ID NO: 1588 - protein, 8 aa, synthetic construct
GRTFRSYT

SEQ ID NO: 1589 - protein, 8 aa, synthetic construct
GRTFRNYT

SEQ ID NO: 1590 - protein, 8 aa, synthetic construct
GRTFSSYT

SEQ ID NO: 1591 - protein, 8 aa, synthetic construct
GRTFRNYT

SEQ ID NO: 1592 - protein, 8 aa, synthetic construct
ERTFESDT

SEQ ID NO: 1593 - protein, 8 aa, synthetic construct
GRTFRNYT

SEQ ID NO: 1594 - protein, 8 aa, synthetic construct
GRTFRNYT

SEQ ID NO: 1595 - protein, 8 aa, synthetic construct
GRTFRNYT

SEQ ID NO: 1596 - protein, 8 aa, synthetic construct
GHTFGSYT

SEQ ID NO: 1597 - protein, 8 aa, synthetic construct
GHTFGSYT

SEQ ID NO: 1598 - protein, 8 aa, synthetic construct
GRTFGNYT

SEQ ID NO: 1599 - protein, 8 aa, synthetic construct
GRTFRNYT

SEQ ID NO: 1600 - protein, 8 aa, synthetic construct
GRTFRNYT

SEQ ID NO: 1601 - protein, 8 aa, synthetic construct
GRTFRNYT

SEQ ID NO: 1602 - protein, 8 aa, synthetic construct
GRTFRNYT

SEQ ID NO: 1603 - protein, 8 aa, synthetic construct
GRTFSSLF

SEQ ID NO: 1604 - protein, 8 aa, synthetic construct
ERTFESDT

SEQ ID NO: 1605 - protein, 8 aa, synthetic construct
GRTFSSYF

SEQ ID NO: 1606 - protein, 8 aa, synthetic construct
GRTFSSYF

SEQ ID NO: 1607 - protein, 8 aa, synthetic construct
GRTFSSYF

SEQ ID NO: 1608 - protein, 8 aa, synthetic construct
GASLSRNA

SEQ ID NO: 1609 - protein, 8 aa, synthetic construct
GSTFRFPP

SEQ ID NO: 1610 - protein, 8 aa, synthetic construct
GSIFRFPP

SEQ ID NO: 1611 - protein, 8 aa, synthetic construct
GNIFRFPP

SEQ ID NO: 1612 - protein, 8 aa, synthetic construct
GNIFRFPP

SEQ ID NO: 1613 - protein, 8 aa, synthetic construct
GSIFRFPP

SEQ ID NO: 1614 - protein, 8 aa, synthetic construct
GSIFRFPP

SEQ ID NO: 1615 - protein, 8 aa, synthetic construct
GSIFRFPP

SEQ ID NO: 1616 - protein, 8 aa, synthetic construct
GSIFRFPP

SEQ ID NO: 1617 - protein, 8 aa, synthetic construct
GSIFRFPP

SEQ ID NO: 1618 - protein, 8 aa, synthetic construct
GSIFRFPP

SEQ ID NO: 1619 - protein, 8 aa, synthetic construct
GSIFRFPP

SEQ ID NO: 1620 - protein, 8 aa, synthetic construct
GSIFRFPP

SEQ ID NO: 1621 - protein, 8 aa, synthetic construct
GSIFRFPP

SEQ ID NO: 1622 - protein, 8 aa, synthetic construct
GSIFRFPP

SEQ ID NO: 1623 - protein, 8 aa, synthetic construct
GSIFRFPP

SEQ ID NO: 1624 - protein, 8 aa, synthetic construct
GSIFRFPP

SEQ ID NO: 1625 - protein, 8 aa, synthetic construct
GSIFRFPP

SEQ ID NO: 1626 - protein, 8 aa, synthetic construct
GSIFRFPP

SEQ ID NO: 1627 - protein, 8 aa, synthetic construct
GSIFRFPP

SEQ ID NO: 1628 - protein, 8 aa, synthetic construct
GSIFRFPP

SEQ ID NO: 1629 - protein, 8 aa, synthetic construct
GSIFRFPP

SEQ ID NO: 1630 - protein, 8 aa, synthetic construct
GSIFRFPP

SEQ ID NO: 1631 - protein, 8 aa, synthetic construct
GSIFRFPP

SEQ ID NO: 1632 - protein, 8 aa, synthetic construct
GSIFRFPP

SEQ ID NO: 1633 - protein, 8 aa, synthetic construct
GSIFRFPP

SEQ ID NO: 1634 - protein, 8 aa, synthetic construct
GSIFRFPP

SEQ ID NO: 1635 - protein, 8 aa, synthetic construct
GSIFRFPP

SEQ ID NO: 1636 - protein, 8 aa, synthetic construct
GSIFRFPP

SEQ ID NO: 1637 - protein, 8 aa, synthetic construct
GSIFRFPP

SEQ ID NO: 1638 - protein, 8 aa, synthetic construct
GSIFRFPP

SEQ ID NO: 1639 - protein, 8 aa, synthetic construct
GSIFRFPP

SEQ ID NO: 1640 - protein, 8 aa, synthetic construct
GSIFRFPP

SEQ ID NO: 1641 - protein, 8 aa, synthetic construct
GSIFRFPP

SEQ ID NO: 1642 - protein, 8 aa, synthetic construct
GSIFRFPP

SEQ ID NO: 1643 - protein, 8 aa, synthetic construct
GSIFRFPP

SEQ ID NO: 1644 - protein, 8 aa, synthetic construct
GSIFRFPP

SEQ ID NO: 1645 - protein, 8 aa, synthetic construct
GSIFRFPP

SEQ ID NO: 1646 - protein, 8 aa, synthetic construct
GSIFRFPP

SEQ ID NO: 1647 - protein, 8 aa, synthetic construct
GSIFRFPP

SEQ ID NO: 1648 - protein, 8 aa, synthetic construct
GSIFRFPP

SEQ ID NO: 1649 - protein, 8 aa, synthetic construct
GSIFRFPP

SEQ ID NO: 1650 - protein, 8 aa, synthetic construct
GGIFRFPP

SEQ ID NO: 1651 - protein, 8 aa, synthetic construct
GSIFRFPP

SEQ ID NO: 1652 - protein, 8 aa, synthetic construct
GSIFRFPP

SEQ ID NO: 1653 - protein, 8 aa, synthetic construct
GSIFRFPP

SEQ ID NO: 1654 - protein, 8 aa, synthetic construct
GSIFRFPP

SEQ ID NO: 1655 - protein, 8 aa, synthetic construct
GSIFRFPP

SEQ ID NO: 1656 - protein, 8 aa, synthetic construct
GSIFRFPP

SEQ ID NO: 1657 - protein, 8 aa, synthetic construct
GSIFRFPP

SEQ ID NO: 1658 - protein, 8 aa, synthetic construct
GSIFRFPP

SEQ ID NO: 1659 - protein, 8 aa, synthetic construct
GSIFRFPP

SEQ ID NO: 1660 - protein, 8 aa, synthetic construct
GSIFRFPP

SEQ ID NO: 1661 - protein, 8 aa, synthetic construct
GSIFRFPP

SEQ ID NO: 1662 - protein, 8 aa, synthetic construct
GSIFRFPP

SEQ ID NO: 1663 - protein, 8 aa, synthetic construct
GSIFRFPP

SEQ ID NO: 1664 - protein, 8 aa, synthetic construct
GSIFRFPP

SEQ ID NO: 1665 - protein, 8 aa, synthetic construct
GSIFRFPP

SEQ ID NO: 1666 - protein, 8 aa, synthetic construct
GSIFRFPP

SEQ ID NO: 1667 - protein, 8 aa, synthetic construct
GSIFRFPP

SEQ ID NO: 1668 - protein, 8 aa, synthetic construct
GSIFRFPP

SEQ ID NO: 1669 - protein, 8 aa, synthetic construct
GSIFRFPP

SEQ ID NO: 1670 - protein, 8 aa, synthetic construct
GSIFRFPP

SEQ ID NO: 1671 - protein, 8 aa, synthetic construct
GSTFRFPP

SEQ ID NO: 1672 - protein, 8 aa, synthetic construct
GSIFRFPP

SEQ ID NO: 1673 - protein, 8 aa, synthetic construct
GSIFRFPP

SEQ ID NO: 1674 - protein, 8 aa, synthetic construct
GSTFRFPP

SEQ ID NO: 1675 - protein, 8 aa, synthetic construct
GSIFRFPP

SEQ ID NO: 1676 - protein, 8 aa, synthetic construct
GSIFRFPP

SEQ ID NO: 1677 - protein, 8 aa, synthetic construct
GSIFRFPP

SEQ ID NO: 1678 - protein, 8 aa, synthetic construct
GSIFRFPP

SEQ ID NO: 1679 - protein, 8 aa, synthetic construct
GSIFRFPP

SEQ ID NO: 1680 - protein, 8 aa, synthetic construct
GSIFRFPP

SEQ ID NO: 1681 - protein, 8 aa, synthetic construct
GSIFRFPP

SEQ ID NO: 1682 - protein, 8 aa, synthetic construct
GSIFRFPP

SEQ ID NO: 1683 - protein, 8 aa, synthetic construct
GSIFRFPP

SEQ ID NO: 1684 - protein, 8 aa, synthetic construct
GSIFRFPP

SEQ ID NO: 1685 - protein, 8 aa, synthetic construct
GSIFRFPP

SEQ ID NO: 1686 - protein, 8 aa, synthetic construct
GSIFRFPP

SEQ ID NO: 1687 - protein, 7 aa, synthetic construct
IRSDGYT

SEQ ID NO: 1688 - protein, 7 aa, synthetic construct
IRSDGFT

SEQ ID NO: 1689 - protein, 7 aa, synthetic construct
IRSDGFT

SEQ ID NO: 1690 - protein, 7 aa, synthetic construct
IRSDGFT

SEQ ID NO: 1691 - protein, 7 aa, synthetic construct
IRSDGFT

SEQ ID NO: 1692 - protein, 7 aa, synthetic construct
IRSDGFT

SEQ ID NO: 1693 - protein, 7 aa, synthetic construct
IRSDGFT

SEQ ID NO: 1694 - protein, 7 aa, synthetic construct
IRSDGFT

SEQ ID NO: 1695 - protein, 7 aa, synthetic construct
IRSDGFI

SEQ ID NO: 1696 - protein, 7 aa, synthetic construct
IRSDGLV

SEQ ID NO: 1697 - protein, 7 aa, synthetic construct
IRSDGFI

SEQ ID NO: 1698 - protein, 7 aa, synthetic construct
IRSDGFT

SEQ ID NO: 1699 - protein, 7 aa, synthetic construct
IRSDGFT

SEQ ID NO: 1700 - protein, 7 aa, synthetic construct
IRSDGFI

SEQ ID NO: 1701 - protein, 7 aa, synthetic construct
LRSDGFT

SEQ ID NO: 1702 - protein, 7 aa, synthetic construct
LRSDGFT

SEQ ID NO: 1703 - protein, 7 aa, synthetic construct
IRSDGLV

SEQ ID NO: 1704 - protein, 7 aa, synthetic construct
IRSDGFI

SEQ ID NO: 1705 - protein, 7 aa, synthetic construct
IRSDGFT

SEQ ID NO: 1706 - protein, 7 aa, synthetic construct
IRSDGFT

SEQ ID NO: 1707 - protein, 7 aa, synthetic construct
IRSDGFT

SEQ ID NO: 1708 - protein, 7 aa, synthetic construct
FRSDGFT

SEQ ID NO: 1709 - protein, 7 aa, synthetic construct
FRSDGFT

SEQ ID NO: 1710 - protein, 7 aa, synthetic construct
IRSDGFI

SEQ ID NO: 1711 - protein, 7 aa, synthetic construct
IRSDGFI

SEQ ID NO: 1712 - protein, 7 aa, synthetic construct
IRSDGFI

SEQ ID NO: 1713 - protein, 7 aa, synthetic construct
IRSDGFI

SEQ ID NO: 1714 - protein, 7 aa, synthetic construct
IRSDGFI

SEQ ID NO: 1715 - protein, 7 aa, synthetic construct
IRSDGFI

SEQ ID NO: 1716 - protein, 7 aa, synthetic construct
IRSDGFI

SEQ ID NO: 1717 - protein, 7 aa, synthetic construct
IRSDGFI

SEQ ID NO: 1718 - protein, 7 aa, synthetic construct
IRSDGFI

SEQ ID NO: 1719 - protein, 7 aa, synthetic construct
IRSDGFI

SEQ ID NO: 1720 - protein, 7 aa, synthetic construct
IRSDGFI

SEQ ID NO: 1721 - protein, 7 aa, synthetic construct
IRSDGFI

SEQ ID NO: 1722 - protein, 7 aa, synthetic construct
IRSDGFI

SEQ ID NO: 1723 - protein, 7 aa, synthetic construct
LRSDGFT

SEQ ID NO: 1724 - protein, 7 aa, synthetic construct
LRSDGFT

SEQ ID NO: 1725 - protein, 7 aa, synthetic construct
IRSDGFI

SEQ ID NO: 1726 - protein, 7 aa, synthetic construct
IRSDGFI

SEQ ID NO: 1727 - protein, 7 aa, synthetic construct
IRSDGFT

SEQ ID NO: 1728 - protein, 7 aa, synthetic construct
IRSDGFT

SEQ ID NO: 1729 - protein, 7 aa, synthetic construct
IRSDGFT

SEQ ID NO: 1730 - protein, 7 aa, synthetic construct
IRSDGFT

SEQ ID NO: 1731 - protein, 7 aa, synthetic construct
IRSDGFT

SEQ ID NO: 1732 - protein, 7 aa, synthetic construct
IRSDGFI

SEQ ID NO: 1733 - protein, 7 aa, synthetic construct
IRSDGFI

SEQ ID NO: 1734 - protein, 7 aa, synthetic construct
IRSDGFI

SEQ ID NO: 1735 - protein, 7 aa, synthetic construct
IRSDGFI

SEQ ID NO: 1736 - protein, 7 aa, synthetic construct
IRSDGFI

SEQ ID NO: 1737 - protein, 7 aa, synthetic construct
IHSNGIT

SEQ ID NO: 1738 - protein, 7 aa, synthetic construct
IRSDGFT

SEQ ID NO: 1739 - protein, 7 aa, synthetic construct
FRSDGFT

SEQ ID NO: 1740 - protein, 7 aa, synthetic construct
IRSDGFT

SEQ ID NO: 1741 - protein, 7 aa, synthetic construct
IRSDGFT

SEQ ID NO: 1742 - protein, 7 aa, synthetic construct
IRSDGFT

SEQ ID NO: 1743 - protein, 7 aa, synthetic construct
IRSDGFI

SEQ ID NO: 1744 - protein, 7 aa, synthetic construct
IRSDGFI

SEQ ID NO: 1745 - protein, 7 aa, synthetic construct
IRSDGFI

SEQ ID NO: 1746 - protein, 7 aa, synthetic construct
IRSDGFI

SEQ ID NO: 1747 - protein, 7 aa, synthetic construct
LRSDGFT

SEQ ID NO: 1748 - protein, 7 aa, synthetic construct
IRSDGYT

SEQ ID NO: 1749 - protein, 7 aa, synthetic construct
IRSDGFI

SEQ ID NO: 1750 - protein, 7 aa, synthetic construct
IRSDGFI

SEQ ID NO: 1751 - protein, 7 aa, synthetic construct
IRSDGFI

SEQ ID NO: 1752 - protein, 7 aa, synthetic construct
IRSDGFI

SEQ ID NO: 1753 - protein, 7 aa, synthetic construct
IRSDGFT

SEQ ID NO: 1754 - protein, 7 aa, synthetic construct
IRSDGFT

SEQ ID NO: 1755 - protein, 7 aa, synthetic construct
IRSDGFT

SEQ ID NO: 1756 - protein, 7 aa, synthetic construct
IRSDGFT

SEQ ID NO: 1757 - protein, 7 aa, synthetic construct
IRSDGFT

SEQ ID NO: 1758 - protein, 7 aa, synthetic construct
IRSDGFT

SEQ ID NO: 1759 - protein, 7 aa, synthetic construct
IRSDGFT

SEQ ID NO: 1760 - protein, 7 aa, synthetic construct
FRSDGFT

SEQ ID NO: 1761 - protein, 7 aa, synthetic construct
FRSDGFT

SEQ ID NO: 1762 - protein, 7 aa, synthetic construct
FRSDGFT

SEQ ID NO: 1763 - protein, 7 aa, synthetic construct
IRSDGFT

SEQ ID NO: 1764 - protein, 7 aa, synthetic construct
IRSDGFT

SEQ ID NO: 1765 - protein, 7 aa, synthetic construct
IRSDGFT

SEQ ID NO: 1766 - protein, 7 aa, synthetic construct
IRSDGFI

SEQ ID NO: 1767 - protein, 7 aa, synthetic construct
IRSDGFI

SEQ ID NO: 1768 - protein, 7 aa, synthetic construct
IRSDGFI

SEQ ID NO: 1769 - protein, 7 aa, synthetic construct
IRSDGFI

SEQ ID NO: 1770 - protein, 7 aa, synthetic construct
IRSDGFI

SEQ ID NO: 1771 - protein, 7 aa, synthetic construct
IRSDGFI

SEQ ID NO: 1772 - protein, 7 aa, synthetic construct
IRSDGFI

SEQ ID NO: 1773 - protein, 7 aa, synthetic construct
IRSDGFI

SEQ ID NO: 1774 - protein, 7 aa, synthetic construct
IRSDGFI

SEQ ID NO: 1775 - protein, 7 aa, synthetic construct
IRSDGFI

SEQ ID NO: 1776 - protein, 7 aa, synthetic construct
LRSDGFT

SEQ ID NO: 1777 - protein, 7 aa, synthetic construct
LRSDGFT

SEQ ID NO: 1778 - protein, 7 aa, synthetic construct
LRSDGFT

SEQ ID NO: 1779 - protein, 7 aa, synthetic construct
LRSDGFT

SEQ ID NO: 1780 - protein, 7 aa, synthetic construct
LRSDGFT

SEQ ID NO: 1781 - protein, 7 aa, synthetic construct
IRRDGFI

SEQ ID NO: 1782 - protein, 7 aa, synthetic construct
IRSDGSI

SEQ ID NO: 1783 - protein, 7 aa, synthetic construct
IRSDGLV

SEQ ID NO: 1784 - protein, 7 aa, synthetic construct
IRSNDMA

SEQ ID NO: 1785 - protein, 7 aa, synthetic construct
IRSDGMV

SEQ ID NO: 1786 - protein, 7 aa, synthetic construct
IRSDGMA

SEQ ID NO: 1787 - protein, 7 aa, synthetic construct
VRTDGFL

SEQ ID NO: 1788 - protein, 7 aa, synthetic construct
IRSDGMV

SEQ ID NO: 1789 - protein, 7 aa, synthetic construct
IRSDGLV

SEQ ID NO: 1790 - protein, 7 aa, synthetic construct
IRSDGMA

SEQ ID NO: 1791 - protein, 7 aa, synthetic construct
IRSNDMA

SEQ ID NO: 1792 - protein, 7 aa, synthetic construct
IHSNGIT

SEQ ID NO: 1793 - protein, 7 aa, synthetic construct
IHSNGIT

SEQ ID NO: 1794 - protein, 7 aa, synthetic construct
IRSDGMV

SEQ ID NO: 1795 - protein, 7 aa, synthetic construct
IRSDGMV

SEQ ID NO: 1796 - protein, 7 aa, synthetic construct
IRSDGMV

SEQ ID NO: 1797 - protein, 7 aa, synthetic construct
IRSDGMV

SEQ ID NO: 1798 - protein, 7 aa, synthetic construct
IRSDGLV

SEQ ID NO: 1799 - protein, 7 aa, synthetic construct
IRSDGMA

SEQ ID NO: 1800 - protein, 7 aa, synthetic construct
IRSDGMA

SEQ ID NO: 1801 - protein, 7 aa, synthetic construct
IHSNGIT

SEQ ID NO: 1802 - protein, 7 aa, synthetic construct
IRSDGMV

SEQ ID NO: 1803 - protein, 7 aa, synthetic construct
IRSDGMV

SEQ ID NO: 1804 - protein, 7 aa, synthetic construct
IRSDGMV

SEQ ID NO: 1805 - protein, 7 aa, synthetic construct
IRSDGMV

SEQ ID NO: 1806 - protein, 7 aa, synthetic construct
IRSDGLV

SEQ ID NO: 1807 - protein, 7 aa, synthetic construct
IRSDGMV

SEQ ID NO: 1808 - protein, 7 aa, synthetic construct
IRSDGMA

SEQ ID NO: 1809 - protein, 7 aa, synthetic construct
IRSNGMA

SEQ ID NO: 1810 - protein, 7 aa, synthetic construct
IRSDGMA

SEQ ID NO: 1811 - protein, 7 aa, synthetic construct
IRSNDMA

SEQ ID NO: 1812 - protein, 7 aa, synthetic construct
IRSNDMA

SEQ ID NO: 1813 - protein, 7 aa, synthetic construct
IRSDGMA

SEQ ID NO: 1814 - protein, 7 aa, synthetic construct
IRSDGFT

SEQ ID NO: 1815 - protein, 7 aa, synthetic construct
IRSDGFT

SEQ ID NO: 1816 - protein, 7 aa, synthetic construct
IRSDGFT

SEQ ID NO: 1817 - protein, 7 aa, synthetic construct
IRSDGFT

SEQ ID NO: 1818 - protein, 7 aa, synthetic construct
FRSDGFT

SEQ ID NO: 1819 - protein, 7 aa, synthetic construct
IRSDGFT

SEQ ID NO: 1820 - protein, 7 aa, synthetic construct
IRSDGFT

SEQ ID NO: 1821 - protein, 7 aa, synthetic construct
FRSDGFT

SEQ ID NO: 1822 - protein, 7 aa, synthetic construct
IRSDGFT

SEQ ID NO: 1823 - protein, 7 aa, synthetic construct
IRSDGFT

SEQ ID NO: 1824 - protein, 7 aa, synthetic construct
FRSDGFT

SEQ ID NO: 1825 - protein, 7 aa, synthetic construct
IRSDGFT

SEQ ID NO: 1826 - protein, 7 aa, synthetic construct
IRSDGFT

SEQ ID NO: 1827 - protein, 7 aa, synthetic construct
IRSDGFT

SEQ ID NO: 1828 - protein, 7 aa, synthetic construct
IRSDGFT

SEQ ID NO: 1829 - protein, 7 aa, synthetic construct
IRSDGFI

SEQ ID NO: 1830 - protein, 7 aa, synthetic construct
FRSDGFT

SEQ ID NO: 1831 - protein, 7 aa, synthetic construct
IRSDGFI

SEQ ID NO: 1832 - protein, 7 aa, synthetic construct
FRSDGFT

SEQ ID NO: 1833 - protein, 7 aa, synthetic construct
FRSDGFT

SEQ ID NO: 1834 - protein, 7 aa, synthetic construct
FRSDGFT

SEQ ID NO: 1835 - protein, 7 aa, synthetic construct
FRSDGFT

SEQ ID NO: 1836 - protein, 7 aa, synthetic construct
FRSDGFT

SEQ ID NO: 1837 - protein, 7 aa, synthetic construct
IRSDGFI

SEQ ID NO: 1838 - protein, 7 aa, synthetic construct
IRSDGFI

SEQ ID NO: 1839 - protein, 7 aa, synthetic construct
IRSDGFT

SEQ ID NO: 1840 - protein, 7 aa, synthetic construct
FRSDGFT

SEQ ID NO: 1841 - protein, 7 aa, synthetic construct
FRSDGFT

SEQ ID NO: 1842 - protein, 7 aa, synthetic construct
FRSDGFT

SEQ ID NO: 1843 - protein, 7 aa, synthetic construct
FRSDGFT

SEQ ID NO: 1844 - protein, 7 aa, synthetic construct
FRSDGFT

SEQ ID NO: 1845 - protein, 7 aa, synthetic construct
IRSDGFI

SEQ ID NO: 1846 - protein, 7 aa, synthetic construct
IRSDGFI

SEQ ID NO: 1847 - protein, 7 aa, synthetic construct
IRSDGFI

SEQ ID NO: 1848 - protein, 7 aa, synthetic construct
IRSDGFT

SEQ ID NO: 1849 - protein, 7 aa, synthetic construct
IRSDGFT

SEQ ID NO: 1850 - protein, 7 aa, synthetic construct
FRSDGFT

SEQ ID NO: 1851 - protein, 7 aa, synthetic construct
FRSDGFT

SEQ ID NO: 1852 - protein, 7 aa, synthetic construct
IRSDGFT

SEQ ID NO: 1853 - protein, 7 aa, synthetic construct
IRSDGFT

SEQ ID NO: 1854 - protein, 7 aa, synthetic construct
IRSDGFT

SEQ ID NO: 1855 - protein, 7 aa, synthetic construct
IRSDGFA

SEQ ID NO: 1856 - protein, 7 aa, synthetic construct
IRSDGFT

SEQ ID NO: 1857 - protein, 7 aa, synthetic construct
IRSDGFT

SEQ ID NO: 1858 - protein, 7 aa, synthetic construct
FRSDGFT

SEQ ID NO: 1859 - protein, 7 aa, synthetic construct
IRSDGFT

SEQ ID NO: 1860 - protein, 7 aa, synthetic construct
IRSDGFT

SEQ ID NO: 1861 - protein, 7 aa, synthetic construct
IRSDGFI

SEQ ID NO: 1862 - protein, 7 aa, synthetic construct
IRSDGFI

SEQ ID NO: 1863 - protein, 7 aa, synthetic construct
IRSDGFI

SEQ ID NO: 1864 - protein, 7 aa, synthetic construct
IRSDGFI

SEQ ID NO: 1865 - protein, 7 aa, synthetic construct
IRSDGLV

SEQ ID NO: 1866 - protein, 7 aa, synthetic construct
IRSDGMA

SEQ ID NO: 1867 - protein, 7 aa, synthetic construct
IRSDGME

SEQ ID NO: 1868 - protein, 7 aa, synthetic construct
IRSDGLV

SEQ ID NO: 1869 - protein, 7 aa, synthetic construct
IRSDGME

SEQ ID NO: 1870 - protein, 7 aa, synthetic construct
IRSNSEP

SEQ ID NO: 1871 - protein, 7 aa, synthetic construct
IRSNGMA

SEQ ID NO: 1872 - protein, 7 aa, synthetic construct
IRSNGMA

SEQ ID NO: 1873 - protein, 7 aa, synthetic construct
IRSNGMA

SEQ ID NO: 1874 - protein, 7 aa, synthetic construct
IRSDGFT

SEQ ID NO: 1875 - protein, 7 aa, synthetic construct
IRSDGFI

SEQ ID NO: 1876 - protein, 7 aa, synthetic construct
IRSNGMA

SEQ ID NO: 1877 - protein, 7 aa, synthetic construct
IRSDGFT

SEQ ID NO: 1878 - protein, 7 aa, synthetic construct
IRSDGFT

SEQ ID NO: 1879 - protein, 7 aa, synthetic construct
IRSDGLV

SEQ ID NO: 1880 - protein, 7 aa, synthetic construct
IRSNGMA

SEQ ID NO: 1881 - protein, 7 aa, synthetic construct
IHSNGIT

SEQ ID NO: 1882 - protein, 7 aa, synthetic construct
IRSNSIA

SEQ ID NO: 1883 - protein, 7 aa, synthetic construct
IRSDGYT

SEQ ID NO: 1884 - protein, 7 aa, synthetic construct
IRSDGFT

SEQ ID NO: 1885 - protein, 7 aa, synthetic construct
IRSNGLA

SEQ ID NO: 1886 - protein, 7 aa, synthetic construct
IRSDGMA

SEQ ID NO: 1887 - protein, 7 aa, synthetic construct
IRSNGMA

SEQ ID NO: 1888 - protein, 7 aa, synthetic construct
IRSNGMA

SEQ ID NO: 1889 - protein, 7 aa, synthetic construct
IRSNGMA

SEQ ID NO: 1890 - protein, 7 aa, synthetic construct
IRSNGMA

SEQ ID NO: 1891 - protein, 7 aa, synthetic construct
IRSNGMA

SEQ ID NO: 1892 - protein, 7 aa, synthetic construct
IRSNGMA

SEQ ID NO: 1893 - protein, 7 aa, synthetic construct
IHSNGIT

SEQ ID NO: 1894 - protein, 7 aa, synthetic construct
IRSDGME

SEQ ID NO: 1895 - protein, 7 aa, synthetic construct
IRSNSEP

SEQ ID NO: 1896 - protein, 7 aa, synthetic construct
IRTNEIA

SEQ ID NO: 1897 - protein, 7 aa, synthetic construct
IRSDGFT

SEQ ID NO: 1898 - protein, 7 aa, synthetic construct
IRSDGFT

SEQ ID NO: 1899 - protein, 7 aa, synthetic construct
IRSDGFT

SEQ ID NO: 1900 - protein, 7 aa, synthetic construct
IRSDGFT

SEQ ID NO: 1901 - protein, 7 aa, synthetic construct
IRSDGFT

SEQ ID NO: 1902 - protein, 7 aa, synthetic construct
IRSDGFT

SEQ ID NO: 1903 - protein, 7 aa, synthetic construct
IRSDGFT

SEQ ID NO: 1904 - protein, 7 aa, synthetic construct
IRSDGFT

SEQ ID NO: 1905 - protein, 7 aa, synthetic construct
IRSDGFT

SEQ ID NO: 1906 - protein, 7 aa, synthetic construct
IRSDGFT

SEQ ID NO: 1907 - protein, 7 aa, synthetic construct
IRSDGYT

SEQ ID NO: 1908 - protein, 7 aa, synthetic construct
IRSDGYT

SEQ ID NO: 1909 - protein, 7 aa, synthetic construct
IRSDGFT

SEQ ID NO: 1910 - protein, 7 aa, synthetic construct
IRSDGFT

SEQ ID NO: 1911 - protein, 7 aa, synthetic construct
IRSDGFI

SEQ ID NO: 1912 - protein, 7 aa, synthetic construct
IRSDGMV

SEQ ID NO: 1913 - protein, 7 aa, synthetic construct
MQSNGYT

SEQ ID NO: 1914 - protein, 7 aa, synthetic construct
IRSDGFT

SEQ ID NO: 1915 - protein, 7 aa, synthetic construct
IRSDGFT

SEQ ID NO: 1916 - protein, 7 aa, synthetic construct
IRSDGFT

SEQ ID NO: 1917 - protein, 7 aa, synthetic construct
IRSDGFT

SEQ ID NO: 1918 - protein, 7 aa, synthetic construct
IRSDGFT

SEQ ID NO: 1919 - protein, 7 aa, synthetic construct
IRSDGFT

SEQ ID NO: 1920 - protein, 7 aa, synthetic construct
IRSDGFT

SEQ ID NO: 1921 - protein, 7 aa, synthetic construct
IRSDGFI

SEQ ID NO: 1922 - protein, 7 aa, synthetic construct
IRSDGFI

SEQ ID NO: 1923 - protein, 7 aa, synthetic construct
INSNGYT

SEQ ID NO: 1924 - protein, 7 aa, synthetic construct
MQSNGYT

SEQ ID NO: 1925 - protein, 7 aa, synthetic construct
IRSDGYT

SEQ ID NO: 1926 - protein, 7 aa, synthetic construct
IRSDGFT

SEQ ID NO: 1927 - protein, 7 aa, synthetic construct
FRSDGFT

SEQ ID NO: 1928 - protein, 7 aa, synthetic construct
IRSDGFT

SEQ ID NO: 1929 - protein, 7 aa, synthetic construct
IRSDGFT

SEQ ID NO: 1930 - protein, 7 aa, synthetic construct
IRSDGFT

SEQ ID NO: 1931 - protein, 7 aa, synthetic construct
IRSDGFT

SEQ ID NO: 1932 - protein, 7 aa, synthetic construct
IRSDGFT

SEQ ID NO: 1933 - protein, 7 aa, synthetic construct
IRSDGFT

SEQ ID NO: 1934 - protein, 7 aa, synthetic construct
IRSDGFT

SEQ ID NO: 1935 - protein, 7 aa, synthetic construct
IRSDGFT

SEQ ID NO: 1936 - protein, 7 aa, synthetic construct
IRSDGFT

SEQ ID NO: 1937 - protein, 7 aa, synthetic construct
IRSDGFT

SEQ ID NO: 1938 - protein, 7 aa, synthetic construct
IRSDGFT

SEQ ID NO: 1939 - protein, 7 aa, synthetic construct
IRSDGFT

SEQ ID NO: 1940 - protein, 7 aa, synthetic construct
IRSDGFT

SEQ ID NO: 1941 - protein, 7 aa, synthetic construct
IRSDGFT

SEQ ID NO: 1942 - protein, 7 aa, synthetic construct
IRSDGFT

SEQ ID NO: 1943 - protein, 7 aa, synthetic construct
IRSDGFI

SEQ ID NO: 1944 - protein, 7 aa, synthetic construct
IRSDGFI

SEQ ID NO: 1945 - protein, 7 aa, synthetic construct
INSNGYT

SEQ ID NO: 1946 - protein, 7 aa, synthetic construct
INSNGYT

SEQ ID NO: 1947 - protein, 7 aa, synthetic construct
INSNGYT

SEQ ID NO: 1948 - protein, 7 aa, synthetic construct
IRSDGFT

SEQ ID NO: 1949 - protein, 7 aa, synthetic construct
IRSDGFT

SEQ ID NO: 1950 - protein, 7 aa, synthetic construct
IRSDGFT

SEQ ID NO: 1951 - protein, 7 aa, synthetic construct
IRSDGFT

SEQ ID NO: 1952 - protein, 7 aa, synthetic construct
IRSDGFT

SEQ ID NO: 1953 - protein, 7 aa, synthetic construct
IRSDGFT

SEQ ID NO: 1954 - protein, 7 aa, synthetic construct
IRSDGFT

SEQ ID NO: 1955 - protein, 7 aa, synthetic construct
IRSDGFT

SEQ ID NO: 1956 - protein, 7 aa, synthetic construct
IRSDGFT

SEQ ID NO: 1957 - protein, 7 aa, synthetic construct
IRSDGFT

SEQ ID NO: 1958 - protein, 7 aa, synthetic construct
IRSDGFT

SEQ ID NO: 1959 - protein, 7 aa, synthetic construct
IRSDGFT

SEQ ID NO: 1960 - protein, 7 aa, synthetic construct
IRSDGFT

SEQ ID NO: 1961 - protein, 7 aa, synthetic construct
IRSDGYT

SEQ ID NO: 1962 - protein, 7 aa, synthetic construct
IRSDGFT

SEQ ID NO: 1963 - protein, 7 aa, synthetic construct
IRSDGFT

SEQ ID NO: 1964 - protein, 7 aa, synthetic construct
IRSDGFT

SEQ ID NO: 1965 - protein, 7 aa, synthetic construct
IRSDGMV

SEQ ID NO: 1966 - protein, 7 aa, synthetic construct
IRSDGFT

SEQ ID NO: 1967 - protein, 7 aa, synthetic construct
IRSDGFT

SEQ ID NO: 1968 - protein, 7 aa, synthetic construct
IRSDGFT

SEQ ID NO: 1969 - protein, 7 aa, synthetic construct
IRSDGFT

SEQ ID NO: 1970 - protein, 7 aa, synthetic construct
IRSDGFT

SEQ ID NO: 1971 - protein, 7 aa, synthetic construct
IRSDGFT

SEQ ID NO: 1972 - protein, 7 aa, synthetic construct
IRSDGFT

SEQ ID NO: 1973 - protein, 7 aa, synthetic construct
IRSDGFT

SEQ ID NO: 1974 - protein, 7 aa, synthetic construct
IRSDGFT

SEQ ID NO: 1975 - protein, 7 aa, synthetic construct
IRSDGFT

SEQ ID NO: 1976 - protein, 7 aa, synthetic construct
IRSDGFT

SEQ ID NO: 1977 - protein, 7 aa, synthetic construct
IRSDGFT

SEQ ID NO: 1978 - protein, 7 aa, synthetic construct
IRSDGFT

SEQ ID NO: 1979 - protein, 7 aa, synthetic construct
IRSDGFT

SEQ ID NO: 1980 - protein, 7 aa, synthetic construct
IRSDGFT

SEQ ID NO: 1981 - protein, 7 aa, synthetic construct
IRSDGFT

SEQ ID NO: 1982 - protein, 7 aa, synthetic construct
IRSDGLV

SEQ ID NO: 1983 - protein, 7 aa, synthetic construct
IRSNDMA

SEQ ID NO: 1984 - protein, 7 aa, synthetic construct
IRSDGLV

SEQ ID NO: 1985 - protein, 7 aa, synthetic construct
IRSNGMA

SEQ ID NO: 1986 - protein, 7 aa, synthetic construct
IRSDGLV

SEQ ID NO: 1987 - protein, 7 aa, synthetic construct
IRSDGLV

SEQ ID NO: 1988 - protein, 8 aa, synthetic construct
IYSYGPNT

SEQ ID NO: 1989 - protein, 8 aa, synthetic construct
IYSYGPNT

SEQ ID NO: 1990 - protein, 8 aa, synthetic construct
IYSYGPNT

SEQ ID NO: 1991 - protein, 8 aa, synthetic construct
IYSYGPNT

SEQ ID NO: 1992 - protein, 8 aa, synthetic construct
IYSYGPNT

SEQ ID NO: 1993 - protein, 8 aa, synthetic construct
IYSYGPNT

SEQ ID NO: 1994 - protein, 8 aa, synthetic construct
IYSYGPNT

SEQ ID NO: 1995 - protein, 8 aa, synthetic construct
IYSYGPNT

SEQ ID NO: 1996 - protein, 8 aa, synthetic construct
IFSYSSNT

SEQ ID NO: 1997 - protein, 8 aa, synthetic construct
IFSYSSNT

SEQ ID NO: 1998 - protein, 8 aa, synthetic construct
IYSDGSET

SEQ ID NO: 1999 - protein, 8 aa, synthetic construct
ISSDGSDT

SEQ ID NO: 2000 - protein, 8 aa, synthetic construct
ISDDGSDT

SEQ ID NO: 2001 - protein, 8 aa, synthetic construct
ISSDGSDT

SEQ ID NO: 2002 - protein, 8 aa, synthetic construct
IYSDGSET

SEQ ID NO: 2003 - protein, 8 aa, synthetic construct
IYSDGSET

SEQ ID NO: 2004 - protein, 8 aa, synthetic construct
IYSDGSET

SEQ ID NO: 2005 - protein, 8 aa, synthetic construct
IYSDGSET

SEQ ID NO: 2006 - protein, 8 aa, synthetic construct
ISDDGSDT

SEQ ID NO: 2007 - protein, 8 aa, synthetic construct
ISSDGSDT

SEQ ID NO: 2008 - protein, 8 aa, synthetic construct
ISSDGSDT

SEQ ID NO: 2009 - protein, 8 aa, synthetic construct
INWSNGRT

SEQ ID NO: 2010 - protein, 8 aa, synthetic construct
INWSNGRT

SEQ ID NO: 2011 - protein, 8 aa, synthetic construct
INWSNGRT

SEQ ID NO: 2012 - protein, 8 aa, synthetic construct
INWSNGRT

SEQ ID NO: 2013 - protein, 8 aa, synthetic construct
INWSNGRT

SEQ ID NO: 2014 - protein, 8 aa, synthetic construct
INWSNGRT

SEQ ID NO: 2015 - protein, 8 aa, synthetic construct
INWSNGRT

SEQ ID NO: 2016 - protein, 8 aa, synthetic construct
INWSNGRT

SEQ ID NO: 2017 - protein, 8 aa, synthetic construct
INWSNGRT

SEQ ID NO: 2018 - protein, 8 aa, synthetic construct
INWSNGRT

SEQ ID NO: 2019 - protein, 8 aa, synthetic construct
INWSNGRT

SEQ ID NO: 2020 - protein, 8 aa, synthetic construct
INWSNGRT

SEQ ID NO: 2021 - protein, 8 aa, synthetic construct
INWSNGRT

SEQ ID NO: 2022 - protein, 8 aa, synthetic construct
INWSNGRT

SEQ ID NO: 2023 - protein, 8 aa, synthetic construct
INWSNGRT

SEQ ID NO: 2024 - protein, 8 aa, synthetic construct
INWSNGRT

SEQ ID NO: 2025 - protein, 8 aa, synthetic construct
INWSNGRT

SEQ ID NO: 2026 - protein, 8 aa, synthetic construct
INWSNGRT

SEQ ID NO: 2027 - protein, 8 aa, synthetic construct
INWSNGRT

SEQ ID NO: 2028 - protein, 8 aa, synthetic construct
INWSNGRT

SEQ ID NO: 2029 - protein, 8 aa, synthetic construct
INWSNGRT

SEQ ID NO: 2030 - protein, 8 aa, synthetic construct
INWSNGRT

SEQ ID NO: 2031 - protein, 8 aa, synthetic construct
INWSNGRT

SEQ ID NO: 2032 - protein, 8 aa, synthetic construct
INWSNGRT

SEQ ID NO: 2033 - protein, 8 aa, synthetic construct
INWSNGRT

SEQ ID NO: 2034 - protein, 8 aa, synthetic construct
INWSNGRT

SEQ ID NO: 2035 - protein, 8 aa, synthetic construct
INWSNGRT

SEQ ID NO: 2036 - protein, 8 aa, synthetic construct
INWSNGRT

SEQ ID NO: 2037 - protein, 8 aa, synthetic construct
INWSNGRT

SEQ ID NO: 2038 - protein, 8 aa, synthetic construct
INWSNGRT

SEQ ID NO: 2039 - protein, 8 aa, synthetic construct
INWSNGRT

SEQ ID NO: 2040 - protein, 8 aa, synthetic construct
INWSNGRT

SEQ ID NO: 2041 - protein, 8 aa, synthetic construct
INWSNGRT

SEQ ID NO: 2042 - protein, 8 aa, synthetic construct
INWSNGRT

SEQ ID NO: 2043 - protein, 8 aa, synthetic construct
INWSNGRT

SEQ ID NO: 2044 - protein, 8 aa, synthetic construct
INWSNGRT

SEQ ID NO: 2045 - protein, 8 aa, synthetic construct
INWSNGRT

SEQ ID NO: 2046 - protein, 8 aa, synthetic construct
INWSNGRT

SEQ ID NO: 2047 - protein, 8 aa, synthetic construct
INWSNGRT

SEQ ID NO: 2048 - protein, 8 aa, synthetic construct
INWSNGRT

SEQ ID NO: 2049 - protein, 8 aa, synthetic construct
INWSNGRT

SEQ ID NO: 2050 - protein, 8 aa, synthetic construct
INWSNGRT

SEQ ID NO: 2051 - protein, 8 aa, synthetic construct
INWSNGRT

SEQ ID NO: 2052 - protein, 8 aa, synthetic construct
INWSNGRT

SEQ ID NO: 2053 - protein, 8 aa, synthetic construct
INWSNGRT

SEQ ID NO: 2054 - protein, 8 aa, synthetic construct
INWSNGRT

SEQ ID NO: 2055 - protein, 8 aa, synthetic construct
INWSNGRT

SEQ ID NO: 2056 - protein, 8 aa, synthetic construct
INWSNGRT

SEQ ID NO: 2057 - protein, 8 aa, synthetic construct
INWSNGRT

SEQ ID NO: 2058 - protein, 8 aa, synthetic construct
INWSNGRT

SEQ ID NO: 2059 - protein, 8 aa, synthetic construct
INWSNGRT

SEQ ID NO: 2060 - protein, 8 aa, synthetic construct
IQWSNGRT

SEQ ID NO: 2061 - protein, 8 aa, synthetic construct
ISWSGKST

SEQ ID NO: 2062 - protein, 8 aa, synthetic construct
INWSNGRT

SEQ ID NO: 2063 - protein, 8 aa, synthetic construct
INWSNGRT

SEQ ID NO: 2064 - protein, 8 aa, synthetic construct
INWSNGRT

SEQ ID NO: 2065 - protein, 8 aa, synthetic construct
INWSNGRT

SEQ ID NO: 2066 - protein, 8 aa, synthetic construct
INWSNGRT

SEQ ID NO: 2067 - protein, 8 aa, synthetic construct
INWSNGRT

SEQ ID NO: 2068 - protein, 8 aa, synthetic construct
INWSNGRT

SEQ ID NO: 2069 - protein, 8 aa, synthetic construct
INWSNGRT

SEQ ID NO: 2070 - protein, 8 aa, synthetic construct
INWSNGRT

SEQ ID NO: 2071 - protein, 8 aa, synthetic construct
INWSNGRT

SEQ ID NO: 2072 - protein, 8 aa, synthetic construct
INWSNGRT

SEQ ID NO: 2073 - protein, 8 aa, synthetic construct
INWSNGRT

SEQ ID NO: 2074 - protein, 8 aa, synthetic construct
INWSNGRT

SEQ ID NO: 2075 - protein, 8 aa, synthetic construct
INWSNGRT

SEQ ID NO: 2076 - protein, 8 aa, synthetic construct
INWSNGRT

SEQ ID NO: 2077 - protein, 8 aa, synthetic construct
INWSTGRT

SEQ ID NO: 2078 - protein, 8 aa, synthetic construct
INWSNGRT

SEQ ID NO: 2079 - protein, 8 aa, synthetic construct
INWSNGRT

SEQ ID NO: 2080 - protein, 8 aa, synthetic construct
INWSNGRT

SEQ ID NO: 2081 - protein, 8 aa, synthetic construct
INWSNGRT

SEQ ID NO: 2082 - protein, 8 aa, synthetic construct
INWSNGRT

SEQ ID NO: 2083 - protein, 8 aa, synthetic construct
INWSNGRT

SEQ ID NO: 2084 - protein, 8 aa, synthetic construct
INWSNGRT

SEQ ID NO: 2085 - protein, 8 aa, synthetic construct
INWSNGRT

SEQ ID NO: 2086 - protein, 8 aa, synthetic construct
INWSNGRT

SEQ ID NO: 2087 - protein, 8 aa, synthetic construct
IRWTGGST

SEQ ID NO: 2088 - protein, 8 aa, synthetic construct
ISTSDGST

SEQ ID NO: 2089 - protein, 8 aa, synthetic construct
ISTSDGST

SEQ ID NO: 2090 - protein, 8 aa, synthetic construct
INVGDGST

SEQ ID NO: 2091 - protein, 7 aa, synthetic construct
IDTGGST

SEQ ID NO: 2092 - protein, 7 aa, synthetic construct
IDTGGST

SEQ ID NO: 2093 - protein, 7 aa, synthetic construct
IDTGGST

SEQ ID NO: 2094 - protein, 7 aa, synthetic construct
IDTGGST

SEQ ID NO: 2095 - protein, 7 aa, synthetic construct
IDTGGST

SEQ ID NO: 2096 - protein, 7 aa, synthetic construct
IDTGGST

SEQ ID NO: 2097 - protein, 7 aa, synthetic construct
IDTGGST

SEQ ID NO: 2098 - protein, 7 aa, synthetic construct
IDTGGST

SEQ ID NO: 2099 - protein, 7 aa, synthetic construct
IDTGGST

SEQ ID NO: 2100 - protein, 7 aa, synthetic construct
IDTGGST

SEQ ID NO: 2101 - protein, 7 aa, synthetic construct
IDTGGST

SEQ ID NO: 2102 - protein, 7 aa, synthetic construct
IDTGGST

SEQ ID NO: 2103 - protein, 7 aa, synthetic construct
IDTGGST

SEQ ID NO: 2104 - protein, 7 aa, synthetic construct
IDTGGST

SEQ ID NO: 2105 - protein, 7 aa, synthetic construct
IDTGGST

SEQ ID NO: 2106 - protein, 7 aa, synthetic construct
IDTGGST

SEQ ID NO: 2107 - protein, 7 aa, synthetic construct
IDTGGST

SEQ ID NO: 2108 - protein, 7 aa, synthetic construct
IDTGGST

SEQ ID NO: 2109 - protein, 7 aa, synthetic construct
IDTGGST

SEQ ID NO: 2110 - protein, 7 aa, synthetic construct
IDTGGST

SEQ ID NO: 2111 - protein, 7 aa, synthetic construct
IDTGGST

SEQ ID NO: 2112 - protein, 7 aa, synthetic construct
IDTGGST

SEQ ID NO: 2113 - protein, 7 aa, synthetic construct
IDTGGST

SEQ ID NO: 2114 - protein, 7 aa, synthetic construct
IDTGGST

SEQ ID NO: 2115 - protein, 7 aa, synthetic construct
IDTGGST

SEQ ID NO: 2116 - protein, 8 aa, synthetic construct
IYSYGPNT

SEQ ID NO: 2117 - protein, 7 aa, synthetic construct
IDTGGST

SEQ ID NO: 2118 - protein, 7 aa, synthetic construct
IDTGGST

SEQ ID NO: 2119 - protein, 7 aa, synthetic construct
IDTGGST

SEQ ID NO: 2120 - protein, 7 aa, synthetic construct
IDTGGST

SEQ ID NO: 2121 - protein, 7 aa, synthetic construct
IDTGGST

SEQ ID NO: 2122 - protein, 7 aa, synthetic construct
IDTGGST

SEQ ID NO: 2123 - protein, 7 aa, synthetic construct
IDTRGST

SEQ ID NO: 2124 - protein, 7 aa, synthetic construct
IDTRGST

SEQ ID NO: 2125 - protein, 7 aa, synthetic construct
IDTGGST

SEQ ID NO: 2126 - protein, 7 aa, synthetic construct
IDTGGST

SEQ ID NO: 2127 - protein, 7 aa, synthetic construct
IDTVDNT

SEQ ID NO: 2128 - protein, 7 aa, synthetic construct
IDTGGST

SEQ ID NO: 2129 - protein, 7 aa, synthetic construct
IDTRGST

SEQ ID NO: 2130 - protein, 7 aa, synthetic construct
IDTGGST

SEQ ID NO: 2131 - protein, 7 aa, synthetic construct
IDTGGST

SEQ ID NO: 2132 - protein, 7 aa, synthetic construct
IDTGGST

SEQ ID NO: 2133 - protein, 7 aa, synthetic construct
IDTRGST

SEQ ID NO: 2134 - protein, 7 aa, synthetic construct
IDTRGST

SEQ ID NO: 2135 - protein, 7 aa, synthetic construct
IDTGGST

SEQ ID NO: 2136 - protein, 7 aa, synthetic construct
IDTRGST

SEQ ID NO: 2137 - protein, 7 aa, synthetic construct
IDTGGST

SEQ ID NO: 2138 - protein, 7 aa, synthetic construct
IDTGGST

SEQ ID NO: 2139 - protein, 7 aa, synthetic construct
IDTGGST

SEQ ID NO: 2140 - protein, 7 aa, synthetic construct
IDTGGST

SEQ ID NO: 2141 - protein, 8 aa, synthetic construct
IRWTGGST

SEQ ID NO: 2142 - protein, 8 aa, synthetic construct
IRWTGGST

SEQ ID NO: 2143 - protein, 8 aa, synthetic construct
IRWTGGST

SEQ ID NO: 2144 - protein, 8 aa, synthetic construct
IRWTGGST

SEQ ID NO: 2145 - protein, 8 aa, synthetic construct
IRWTGGST

SEQ ID NO: 2146 - protein, 8 aa, synthetic construct
IRWTGGST

SEQ ID NO: 2147 - protein, 8 aa, synthetic construct
IRWTGGST

SEQ ID NO: 2148 - protein, 8 aa, synthetic construct
IRWTGGST

SEQ ID NO: 2149 - protein, 8 aa, synthetic construct
IRWATLTT

SEQ ID NO: 2150 - protein, 8 aa, synthetic construct
IRWTGGST

SEQ ID NO: 2151 - protein, 8 aa, synthetic construct
IRWPGGST

SEQ ID NO: 2152 - protein, 8 aa, synthetic construct
IRWTGGST

SEQ ID NO: 2153 - protein, 8 aa, synthetic construct
IRWTGGST

SEQ ID NO: 2154 - protein, 8 aa, synthetic construct
IRWTGGST

SEQ ID NO: 2155 - protein, 8 aa, synthetic construct
IKWTGGST

SEQ ID NO: 2156 - protein, 8 aa, synthetic construct
IRRTGGST

SEQ ID NO: 2157 - protein, 8 aa, synthetic construct
IRWTGGST

SEQ ID NO: 2158 - protein, 8 aa, synthetic construct
IRWTGGST

SEQ ID NO: 2159 - protein, 8 aa, synthetic construct
IRRTGGST

SEQ ID NO: 2160 - protein, 8 aa, synthetic construct
IRWTGRST

SEQ ID NO: 2161 - protein, 8 aa, synthetic construct
IRWTGGST

SEQ ID NO: 2162 - protein, 8 aa, synthetic construct
IRYPGLIT

SEQ ID NO: 2163 - protein, 8 aa, synthetic construct
IRWPGGST

SEQ ID NO: 2164 - protein, 8 aa, synthetic construct
IRYPGLIT

SEQ ID NO: 2165 - protein, 8 aa, synthetic construct
IRYPGLIT

SEQ ID NO: 2166 - protein, 8 aa, synthetic construct
IRYPGLIT

SEQ ID NO: 2167 - protein, 7 aa, synthetic construct
IYDDGET

SEQ ID NO: 2168 - protein, 7 aa, synthetic construct
LTSGGST

SEQ ID NO: 2169 - protein, 7 aa, synthetic construct
LTSGGST

SEQ ID NO: 2170 - protein, 7 aa, synthetic construct
LTSGGST

SEQ ID NO: 2171 - protein, 7 aa, synthetic construct
LTSGGST

SEQ ID NO: 2172 - protein, 7 aa, synthetic construct
LTSGGST

SEQ ID NO: 2173 - protein, 7 aa, synthetic construct
LTSGGST

SEQ ID NO: 2174 - protein, 7 aa, synthetic construct
LTSGGST

SEQ ID NO: 2175 - protein, 7 aa, synthetic construct
LTSGGST

SEQ ID NO: 2176 - protein, 7 aa, synthetic construct
LTSGGST

SEQ ID NO: 2177 - protein, 7 aa, synthetic construct
LTSGGST

SEQ ID NO: 2178 - protein, 7 aa, synthetic construct
LTSGGST

SEQ ID NO: 2179 - protein, 7 aa, synthetic construct
LTSGGST

SEQ ID NO: 2180 - protein, 7 aa, synthetic construct
LTSGGST

SEQ ID NO: 2181 - protein, 7 aa, synthetic construct
LTSGGST

SEQ ID NO: 2182 - protein, 7 aa, synthetic construct
LTSGGST

SEQ ID NO: 2183 - protein, 7 aa, synthetic construct
LTSGGST

SEQ ID NO: 2184 - protein, 7 aa, synthetic construct
LTSGGST

SEQ ID NO: 2185 - protein, 7 aa, synthetic construct
LTSGGST

SEQ ID NO: 2186 - protein, 7 aa, synthetic construct
LTSGGST

SEQ ID NO: 2187 - protein, 7 aa, synthetic construct
LTSGGST

SEQ ID NO: 2188 - protein, 7 aa, synthetic construct
LTSGGST

SEQ ID NO: 2189 - protein, 7 aa, synthetic construct
LTSGGST

SEQ ID NO: 2190 - protein, 7 aa, synthetic construct
LTSGGSA

SEQ ID NO: 2191 - protein, 7 aa, synthetic construct
LTSGGST

SEQ ID NO: 2192 - protein, 7 aa, synthetic construct
LTSGGST

SEQ ID NO: 2193 - protein, 7 aa, synthetic construct
LTSGGST

SEQ ID NO: 2194 - protein, 7 aa, synthetic construct
LTSGGST

SEQ ID NO: 2195 - protein, 7 aa, synthetic construct
LTSGGST

SEQ ID NO: 2196 - protein, 7 aa, synthetic construct
LTSGGST

SEQ ID NO: 2197 - protein, 7 aa, synthetic construct
LTSGGST

SEQ ID NO: 2198 - protein, 7 aa, synthetic construct
LTSGGST

SEQ ID NO: 2199 - protein, 7 aa, synthetic construct
LTSGGST

SEQ ID NO: 2200 - protein, 7 aa, synthetic construct
LTSGGST

SEQ ID NO: 2201 - protein, 7 aa, synthetic construct
LTSGGST

SEQ ID NO: 2202 - protein, 7 aa, synthetic construct
LTSGGST

SEQ ID NO: 2203 - protein, 7 aa, synthetic construct
LTSGGST

SEQ ID NO: 2204 - protein, 7 aa, synthetic construct
LTSGGST

SEQ ID NO: 2205 - protein, 7 aa, synthetic construct
LTSGGST

SEQ ID NO: 2206 - protein, 7 aa, synthetic construct
LTSGGST

SEQ ID NO: 2207 - protein, 7 aa, synthetic construct
LTSGGST

SEQ ID NO: 2208 - protein, 7 aa, synthetic construct
LTSGGST

SEQ ID NO: 2209 - protein, 7 aa, synthetic construct
LTSGGST

SEQ ID NO: 2210 - protein, 7 aa, synthetic construct
LTSGGST

SEQ ID NO: 2211 - protein, 7 aa, synthetic construct
LTSGGST

SEQ ID NO: 2212 - protein, 7 aa, synthetic construct
LTSGGST

SEQ ID NO: 2213 - protein, 7 aa, synthetic construct
LTSGGST

SEQ ID NO: 2214 - protein, 7 aa, synthetic construct
LTSGGST

SEQ ID NO: 2215 - protein, 7 aa, synthetic construct
LTSGGST

SEQ ID NO: 2216 - protein, 7 aa, synthetic construct
LTSGGST

SEQ ID NO: 2217 - protein, 7 aa, synthetic construct
LTSGGST

SEQ ID NO: 2218 - protein, 7 aa, synthetic construct
LTSGGST

SEQ ID NO: 2219 - protein, 7 aa, synthetic construct
LTSGGST

SEQ ID NO: 2220 - protein, 7 aa, synthetic construct
LTSGGST

SEQ ID NO: 2221 - protein, 7 aa, synthetic construct
LTSGGST

SEQ ID NO: 2222 - protein, 7 aa, synthetic construct
LTSGGST

SEQ ID NO: 2223 - protein, 7 aa, synthetic construct
LTSGGST

SEQ ID NO: 2224 - protein, 7 aa, synthetic construct
LTSGGST

SEQ ID NO: 2225 - protein, 7 aa, synthetic construct
LTSGGST

SEQ ID NO: 2226 - protein, 7 aa, synthetic construct
LTSGGST

SEQ ID NO: 2227 - protein, 7 aa, synthetic construct
LTSGGST

SEQ ID NO: 2228 - protein, 7 aa, synthetic construct
LTSGGST

SEQ ID NO: 2229 - protein, 7 aa, synthetic construct
LTSGGST

SEQ ID NO: 2230 - protein, 7 aa, synthetic construct
LTSGGST

SEQ ID NO: 2231 - protein, 7 aa, synthetic construct
LTSGGST

SEQ ID NO: 2232 - protein, 7 aa, synthetic construct
LTSGGST

SEQ ID NO: 2233 - protein, 7 aa, synthetic construct
LTSGGST

SEQ ID NO: 2234 - protein, 7 aa, synthetic construct
LTSGGST

SEQ ID NO: 2235 - protein, 7 aa, synthetic construct
LTSGGST

SEQ ID NO: 2236 - protein, 7 aa, synthetic construct
LTSGGST

SEQ ID NO: 2237 - protein, 7 aa, synthetic construct
LTSGGST

SEQ ID NO: 2238 - protein, 7 aa, synthetic construct
LTSGGST

SEQ ID NO: 2239 - protein, 7 aa, synthetic construct
LTSGGST

SEQ ID NO: 2240 - protein, 7 aa, synthetic construct
LTSGGST

SEQ ID NO: 2241 - protein, 7 aa, synthetic construct
LTSGGST

SEQ ID NO: 2242 - protein, 7 aa, synthetic construct
LTSGGST

SEQ ID NO: 2243 - protein, 7 aa, synthetic construct
LTSGGST

SEQ ID NO: 2244 - protein, 7 aa, synthetic construct
LTSGGST

SEQ ID NO: 2245 - protein, 7 aa, synthetic construct
LTSGGST

SEQ ID NO: 2246 - protein, 14 aa, synthetic construct
YYQSLSSPNYGQVF

SEQ ID NO: 2247 - protein, 14 aa, synthetic construct
FYQSLSTPSYGQTF

SEQ ID NO: 2248 - protein, 14 aa, synthetic construct
YYQSLSSPNYGQVF

SEQ ID NO: 2249 - protein, 14 aa, synthetic construct
YYQSLSSPNYGQVF

SEQ ID NO: 2250 - protein, 14 aa, synthetic construct
YYQALSSPNYGQTF

SEQ ID NO: 2251 - protein, 14 aa, synthetic construct
YYQALSSPNYGQTF

SEQ ID NO: 2252 - protein, 14 aa, synthetic construct
YYQALSSPNYGQTF

SEQ ID NO: 2253 - protein, 14 aa, synthetic construct
YYQSLSTPNYGQTF

SEQ ID NO: 2254 - protein, 14 aa, synthetic construct
FYQSLSTPNFGQVF

SEQ ID NO: 2255 - protein, 14 aa, synthetic construct
YYQSLSTPNYGQTF

SEQ ID NO: 2256 - protein, 14 aa, synthetic construct
FYQSLSHPNYGHVF

SEQ ID NO: 2257 - protein, 14 aa, synthetic construct
FYQPLSTPNYGQTF

SEQ ID NO: 2258 - protein, 14 aa, synthetic construct
FYQSLSTPNYGRTF

SEQ ID NO: 2259 - protein, 14 aa, synthetic construct
FYHSLSTPNYGQVF

SEQ ID NO: 2260 - protein, 14 aa, synthetic construct
FYQSLSTPNSGQTF

SEQ ID NO: 2261 - protein, 14 aa, synthetic construct
FYQSLSTPKYGQTF

SEQ ID NO: 2262 - protein, 14 aa, synthetic construct
YYQSFSSPNYGQTF

SEQ ID NO: 2263 - protein, 14 aa, synthetic construct
FYHSLSTPNYGQVF

SEQ ID NO: 2264 - protein, 14 aa, synthetic construct
FYQSLGTPNYGQTF

SEQ ID NO: 2265 - protein, 14 aa, synthetic construct
FDQSLSTPNYGQTF

SEQ ID NO: 2266 - protein, 14 aa, synthetic construct
FYQSLSTPKYGQTF

SEQ ID NO: 2267 - protein, 14 aa, synthetic construct
FYQSLSTPNVGQTF

SEQ ID NO: 2268 - protein, 14 aa, synthetic construct
FYQSLSTPTFGQTF

SEQ ID NO: 2269 - protein, 14 aa, synthetic construct
FYQSLSTPNFGQVF

SEQ ID NO: 2270 - protein, 14 aa, synthetic construct
FYQSLSTPNYGQLF

SEQ ID NO: 2271 - protein, 14 aa, synthetic construct
FYQSLSTPNYGQVF

SEQ ID NO: 2272 - protein, 14 aa, synthetic construct
FYQSLSTHNYGQVF

SEQ ID NO: 2273 - protein, 14 aa, synthetic construct
FYQSLSTSNYGQVF

SEQ ID NO: 2274 - protein, 14 aa, synthetic construct
FYQSLSTPTYGQVF

SEQ ID NO: 2275 - protein, 14 aa, synthetic construct
FYQSLSTPKYGQVF

SEQ ID NO: 2276 - protein, 14 aa, synthetic construct
FYQSLSTPNYGHVF

SEQ ID NO: 2277 - protein, 14 aa, synthetic construct
FYQSLGTPNYGQVF

SEQ ID NO: 2278 - protein, 14 aa, synthetic construct
FSQSLSTPNYGQVF

SEQ ID NO: 2279 - protein, 14 aa, synthetic construct
FDQSLSTPNYGQVF

SEQ ID NO: 2280 - protein, 14 aa, synthetic construct
FYQSHSTPNYGQVF

SEQ ID NO: 2281 - protein, 14 aa, synthetic construct
FYQSLSTPNYGRVF

SEQ ID NO: 2282 - protein, 14 aa, synthetic construct
FYQSHSTPNYGQTF

SEQ ID NO: 2283 - protein, 14 aa, synthetic construct
FDQSLSTPNYGQTF

SEQ ID NO: 2284 - protein, 14 aa, synthetic construct
FYQSLSHPNYGHVF

SEQ ID NO: 2285 - protein, 14 aa, synthetic construct
FHQSLSTPNYGQVF

SEQ ID NO: 2286 - protein, 14 aa, synthetic construct
YYQSLSSPNYGQTI

SEQ ID NO: 2287 - protein, 14 aa, synthetic construct
FYQSLSTPNYGQTF

SEQ ID NO: 2288 - protein, 14 aa, synthetic construct
FYQSLGTPNYGQTF

SEQ ID NO: 2289 - protein, 14 aa, synthetic construct
FYHSLSTPNYGQTF

SEQ ID NO: 2290 - protein, 14 aa, synthetic construct
FYQSLSTPNSGQTF

SEQ ID NO: 2291 - protein, 14 aa, synthetic construct
FYQSLSSPNYGQTF

SEQ ID NO: 2292 - protein, 14 aa, synthetic construct
FYQSLSSANYGQVF

SEQ ID NO: 2293 - protein, 14 aa, synthetic construct
FYQSLSTPTYGQVF

SEQ ID NO: 2294 - protein, 14 aa, synthetic construct
FYQSLSTPNYGQVS

SEQ ID NO: 2295 - protein, 14 aa, synthetic construct
FYQSISTPNYGQVF

SEQ ID NO: 2296 - protein, 14 aa, synthetic construct
YYQSLSSTNYGQAF

SEQ ID NO: 2297 - protein, 14 aa, synthetic construct
FSQSLSTPNYGQTF

SEQ ID NO: 2298 - protein, 14 aa, synthetic construct
FYQSLSTPKFGQTF

SEQ ID NO: 2299 - protein, 14 aa, synthetic construct
FYQSLSSPNYGQTF

SEQ ID NO: 2300 - protein, 14 aa, synthetic construct
SYQALSSPNSGQTF

SEQ ID NO: 2301 - protein, 14 aa, synthetic construct
FYQSLSSANYGQVF

SEQ ID NO: 2302 - protein, 14 aa, synthetic construct
FYQSLSTHNYGQVF

SEQ ID NO: 2303 - protein, 14 aa, synthetic construct
FYQSLSTPNYGKVF

SEQ ID NO: 2304 - protein, 14 aa, synthetic construct
FYQSLSTPNYGQVY

SEQ ID NO: 2305 - protein, 14 aa, synthetic construct
FYQSLRTPNYGQVF

SEQ ID NO: 2306 - protein, 14 aa, synthetic construct
FYQSLSSPNYGQTF

SEQ ID NO: 2307 - protein, 14 aa, synthetic construct
YYQSLSSPNYGQTI

SEQ ID NO: 2308 - protein, 14 aa, synthetic construct
FYQSLSTPNYGQVS

SEQ ID NO: 2309 - protein, 14 aa, synthetic construct
FYQSLSTPNYGKVF

SEQ ID NO: 2310 - protein, 14 aa, synthetic construct
FYQSLSTPNYGHVF

SEQ ID NO: 2311 - protein, 14 aa, synthetic construct
FYQSLSHPNYGHVF

SEQ ID NO: 2312 - protein, 14 aa, synthetic construct
FYQSLSSPNYGQTF

SEQ ID NO: 2313 - protein, 14 aa, synthetic construct
FYQPLSTPNYGQTF

SEQ ID NO: 2314 - protein, 14 aa, synthetic construct
FYQSLRTPNYGQTF

SEQ ID NO: 2315 - protein, 14 aa, synthetic construct
FYQSLSTPNYGHTF

SEQ ID NO: 2316 - protein, 14 aa, synthetic construct
FYQSLSTPNHGQTF

SEQ ID NO: 2317 - protein, 14 aa, synthetic construct
FYQSLSTPNYGQTY

SEQ ID NO: 2318 - protein, 14 aa, synthetic construct
FYQSLSTPTYGQTF

SEQ ID NO: 2319 - protein, 14 aa, synthetic construct
FYQSLSSPNYGQTF

SEQ ID NO: 2320 - protein, 14 aa, synthetic construct
FYQSLSTPNSGQTF

SEQ ID NO: 2321 - protein, 14 aa, synthetic construct
FYQSLSTPIFGQTF

SEQ ID NO: 2322 - protein, 14 aa, synthetic construct
FYQPLSTPNYGQTF

SEQ ID NO: 2323 - protein, 14 aa, synthetic construct
DYQALSSPKYGQTF

SEQ ID NO: 2324 - protein, 14 aa, synthetic construct
YYQALSSPNYGQTF

SEQ ID NO: 2325 - protein, 14 aa, synthetic construct
FYQSLSTPNFGQVF

SEQ ID NO: 2326 - protein, 14 aa, synthetic construct
FYQSLSTPNFGQVF

SEQ ID NO: 2327 - protein, 14 aa, synthetic construct
FYQSLSTPNYGLVF

SEQ ID NO: 2328 - protein, 14 aa, synthetic construct
FYQSLSTPNYGRVF

SEQ ID NO: 2329 - protein, 14 aa, synthetic construct
FYQSLSAPNYGQVF

SEQ ID NO: 2330 - protein, 14 aa, synthetic construct
FYQSLSTPNYVQVF

SEQ ID NO: 2331 - protein, 14 aa, synthetic construct
FYQSLITPNYGQVF

SEQ ID NO: 2332 - protein, 14 aa, synthetic construct
FYQSLSTPNYGQLF

SEQ ID NO: 2333 - protein, 14 aa, synthetic construct
FYQSLSTHNYGQVF

SEQ ID NO: 2334 - protein, 14 aa, synthetic construct
FYQSLSTPNYGRVF

SEQ ID NO: 2335 - protein, 14 aa, synthetic construct
FYHSLSTPNYGQTF

SEQ ID NO: 2336 - protein, 14 aa, synthetic construct
FYQSLSTPNYGHTF

SEQ ID NO: 2337 - protein, 14 aa, synthetic construct
FYQSLRTPNYGQTF

SEQ ID NO: 2338 - protein, 14 aa, synthetic construct
FSQSLSTPNYGQTF

SEQ ID NO: 2339 - protein, 14 aa, synthetic construct
FYQSLSTPNDGQTF

SEQ ID NO: 2340 - protein, 14 aa, synthetic construct
FYQSLSTHNYGQVF

SEQ ID NO: 2341 - protein, 14 aa, synthetic construct
FYQSLGTPNYGQVF

SEQ ID NO: 2342 - protein, 14 aa, synthetic construct
YYQSFSSANYGQVF

SEQ ID NO: 2343 - protein, 14 aa, synthetic construct
YYQSLSSANYGQVF

SEQ ID NO: 2344 - protein, 14 aa, synthetic construct
YYQSLGSANYGQVF

SEQ ID NO: 2345 - protein, 14 aa, synthetic construct
YYQSYSSANYGHVF

SEQ ID NO: 2346 - protein, 14 aa, synthetic construct
YYQSLGSANYGQVF

SEQ ID NO: 2347 - protein, 14 aa, synthetic construct
YYQSLSSANYGRVF

SEQ ID NO: 2348 - protein, 14 aa, synthetic construct
YYQSFSSANYGQVF

SEQ ID NO: 2349 - protein, 14 aa, synthetic construct
YYQSYSSANYGHVF

SEQ ID NO: 2350 - protein, 14 aa, synthetic construct
YYHSLSSANYGQVF

SEQ ID NO: 2351 - protein, 14 aa, synthetic construct
YYQSYSSANYGQAF

SEQ ID NO: 2352 - protein, 14 aa, synthetic construct
YYQSYSSANYGQAF

SEQ ID NO: 2353 - protein, 14 aa, synthetic construct
YYQSLSSANYGQVS

SEQ ID NO: 2354 - protein, 14 aa, synthetic construct
YYQSLSSANYGQVF

SEQ ID NO: 2355 - protein, 14 aa, synthetic construct
YYHSLSSANYGQVF

SEQ ID NO: 2356 - protein, 14 aa, synthetic construct
YYQSLSSASYGQVF

SEQ ID NO: 2357 - protein, 14 aa, synthetic construct
YYQSYSSANYGQVL

SEQ ID NO: 2358 - protein, 14 aa, synthetic construct
YYQSYSSASYGHVF

SEQ ID NO: 2359 - protein, 14 aa, synthetic construct
YYQSYSSANYGHVF

SEQ ID NO: 2360 - protein, 14 aa, synthetic construct
YYQSYSSANYGQAF

SEQ ID NO: 2361 - protein, 14 aa, synthetic construct
YDQSLSSANYGQVF

SEQ ID NO: 2362 - protein, 14 aa, synthetic construct
YYQSLSSAKYGQVF

SEQ ID NO: 2363 - protein, 14 aa, synthetic construct
YYQSLSSATYGQVF

SEQ ID NO: 2364 - protein, 14 aa, synthetic construct
YYQSLRSANYGQVF

SEQ ID NO: 2365 - protein, 14 aa, synthetic construct
YYQSLSSANYGRVF

SEQ ID NO: 2366 - protein, 14 aa, synthetic construct
YYQSLSSANYGKVF

SEQ ID NO: 2367 - protein, 14 aa, synthetic construct
YYQSYSSANYGHVF

SEQ ID NO: 2368 - protein, 14 aa, synthetic construct
YYQSFSSDNYGHVF

SEQ ID NO: 2369 - protein, 14 aa, synthetic construct
YYQSYSSANYGHVF

SEQ ID NO: 2370 - protein, 14 aa, synthetic construct
YDQSLSSANYGQVF

SEQ ID NO: 2371 - protein, 14 aa, synthetic construct
YYQSLRSANYGQVF

SEQ ID NO: 2372 - protein, 14 aa, synthetic construct
YHQSLSSANYGQVF

SEQ ID NO: 2373 - protein, 14 aa, synthetic construct
YYQSLTTPNFGQVF

SEQ ID NO: 2374 - protein, 14 aa, synthetic construct
YYQSLTTPNYGQLF

SEQ ID NO: 2375 - protein, 14 aa, synthetic construct
YYQSLTTPNFGQVF

SEQ ID NO: 2376 - protein, 14 aa, synthetic construct
FYQSLSTPNFGQTF

SEQ ID NO: 2377 - protein, 14 aa, synthetic construct
FYQSLSTPNFGQTF

SEQ ID NO: 2378 - protein, 14 aa, synthetic construct
FYQSLSTPNFGQTI

SEQ ID NO: 2379 - protein, 14 aa, synthetic construct
FYQSLSTPNFGKTF

SEQ ID NO: 2380 - protein, 14 aa, synthetic construct
FYQSLSTPNFGLTF

SEQ ID NO: 2381 - protein, 14 aa, synthetic construct
FYQSLTTPNFGQVF

SEQ ID NO: 2382 - protein, 14 aa, synthetic construct
FYQSLTAPNFGQVF

SEQ ID NO: 2383 - protein, 14 aa, synthetic construct
FYQSLSTPNFGHTF

SEQ ID NO: 2384 - protein, 14 aa, synthetic construct
YYQSLTTPNFGQVF

SEQ ID NO: 2385 - protein, 14 aa, synthetic construct
FYQSLTAPNFGQVF

SEQ ID NO: 2386 - protein, 14 aa, synthetic construct
FYQSLTAPNFGQVF

SEQ ID NO: 2387 - protein, 14 aa, synthetic construct
YYQSLSTPNFGQTF

SEQ ID NO: 2388 - protein, 14 aa, synthetic construct
FYHSLSTPNFGQLF

SEQ ID NO: 2389 - protein, 14 aa, synthetic construct
FYQSLSTPNFGRTF

SEQ ID NO: 2390 - protein, 14 aa, synthetic construct
FYQSLSTPNFGQLS

SEQ ID NO: 2391 - protein, 14 aa, synthetic construct
FYQPLSTPNFGQTF

SEQ ID NO: 2392 - protein, 14 aa, synthetic construct
FYHSLSTPNFGQTF

SEQ ID NO: 2393 - protein, 14 aa, synthetic construct
FYQSLRTPNFGQTF

SEQ ID NO: 2394 - protein, 14 aa, synthetic construct
FSQSLSTPNFGQTF

SEQ ID NO: 2395 - protein, 14 aa, synthetic construct
SYQSLSTPNFGQTF

SEQ ID NO: 2396 - protein, 14 aa, synthetic construct
FYQSLSTPNFGQLV

SEQ ID NO: 2397 - protein, 14 aa, synthetic construct
FYHSLSTPNFGQLF

SEQ ID NO: 2398 - protein, 14 aa, synthetic construct
FYQSLTTPNFGQLF

SEQ ID NO: 2399 - protein, 14 aa, synthetic construct
FDQSLSTPNFGQTF

SEQ ID NO: 2400 - protein, 14 aa, synthetic construct
FYQSHSTPNFGQTF

SEQ ID NO: 2401 - protein, 14 aa, synthetic construct
FYQSISTPNFGQTF

SEQ ID NO: 2402 - protein, 14 aa, synthetic construct
LYQSLSTPNFGQTF

SEQ ID NO: 2403 - protein, 14 aa, synthetic construct
FYQSLSTHNFGQTF

SEQ ID NO: 2404 - protein, 14 aa, synthetic construct
FYQSLSAPNFGQLF

SEQ ID NO: 2405 - protein, 14 aa, synthetic construct
FYQSLSTPNFGHLF

SEQ ID NO: 2406 - protein, 14 aa, synthetic construct
SYQSLSTPNFGQLF

SEQ ID NO: 2407 - protein, 14 aa, synthetic construct
FYHSLTTPNFGQVF

SEQ ID NO: 2408 - protein, 14 aa, synthetic construct
YYQSLTTPNYGQLF

SEQ ID NO: 2409 - protein, 14 aa, synthetic construct
FYQSLSTPNFDQTF

SEQ ID NO: 2410 - protein, 14 aa, synthetic construct
IYQSLSTPNFGQTF

SEQ ID NO: 2411 - protein, 14 aa, synthetic construct
YYQSLSTPNFGQLF

SEQ ID NO: 2412 - protein, 14 aa, synthetic construct
FYQSLTTPNFGQLF

SEQ ID NO: 2413 - protein, 14 aa, synthetic construct
YYQSLTTPNYGQLF

SEQ ID NO: 2414 - protein, 14 aa, synthetic construct
FYQSLTTPNFGQLF

SEQ ID NO: 2415 - protein, 14 aa, synthetic construct
YYQSLTTPNYGQLF

SEQ ID NO: 2416 - protein, 14 aa, synthetic construct
FYQSLTTPNFGQLF

SEQ ID NO: 2417 - protein, 14 aa, synthetic construct
FYKSLSTPNFGQTF

SEQ ID NO: 2418 - protein, 14 aa, synthetic construct
YYQSLTTPNFGQVF

SEQ ID NO: 2419 - protein, 14 aa, synthetic construct
YHQSLTTPNFGQVF

SEQ ID NO: 2420 - protein, 14 aa, synthetic construct
FYQSLGTPNFGQLF

SEQ ID NO: 2421 - protein, 14 aa, synthetic construct
FYQPLSTPNFGQLF

SEQ ID NO: 2422 - protein, 14 aa, synthetic construct
FYQPLSTPNFGQLF

SEQ ID NO: 2423 - protein, 14 aa, synthetic construct
FYQSLSTPNFGLLF

SEQ ID NO: 2424 - protein, 14 aa, synthetic construct
YYQSLSTPNFGQTF

SEQ ID NO: 2425 - protein, 14 aa, synthetic construct
YYQSLSSANFGQLF

SEQ ID NO: 2426 - protein, 14 aa, synthetic construct
YYQSLSSANFGQLF

SEQ ID NO: 2427 - protein, 14 aa, synthetic construct
YYQSFSSANFGQTI

SEQ ID NO: 2428 - protein, 14 aa, synthetic construct
YYQSLGSANFGQLF

SEQ ID NO: 2429 - protein, 14 aa, synthetic construct
YYQSLSSVNWGQVF

SEQ ID NO: 2430 - protein, 14 aa, synthetic construct
YYQSLGSANYGQLF

SEQ ID NO: 2431 - protein, 14 aa, synthetic construct
YYHSLSSANYGQLF

SEQ ID NO: 2432 - protein, 14 aa, synthetic construct
YYQSLSGANYGQLF

SEQ ID NO: 2433 - protein, 14 aa, synthetic construct
YYQALSSANYGQLF

SEQ ID NO: 2434 - protein, 14 aa, synthetic construct
FYQSLSSANYGQLF

SEQ ID NO: 2435 - protein, 14 aa, synthetic construct
YDQSLSSANYGQLF

SEQ ID NO: 2436 - protein, 14 aa, synthetic construct
YYQSLSSPNFGQTF

SEQ ID NO: 2437 - protein, 14 aa, synthetic construct
YYQSLSSPNFGQTI

SEQ ID NO: 2438 - protein, 14 aa, synthetic construct
YYQSFSSANFGQTF

SEQ ID NO: 2439 - protein, 14 aa, synthetic construct
YYQSLSSANYGQLF

SEQ ID NO: 2440 - protein, 14 aa, synthetic construct
YYQSLSSANYGQTF

SEQ ID NO: 2441 - protein, 14 aa, synthetic construct
YYQSLSSVNWGQVF

SEQ ID NO: 2442 - protein, 14 aa, synthetic construct
YYQSLSSPNFGQTF

SEQ ID NO: 2443 - protein, 14 aa, synthetic construct
YYQALSSPNFGQLF

SEQ ID NO: 2444 - protein, 14 aa, synthetic construct
YYQSFNSANYGQLF

SEQ ID NO: 2445 - protein, 14 aa, synthetic construct
YYQSLSSANFGQLF

SEQ ID NO: 2446 - protein, 14 aa, synthetic construct
YYQSLRSANYGQLF

SEQ ID NO: 2447 - protein, 14 aa, synthetic construct
YYQSLSSADYGQLF

SEQ ID NO: 2448 - protein, 14 aa, synthetic construct
YYQSLSSASYGQLF

SEQ ID NO: 2449 - protein, 14 aa, synthetic construct
YSQSLSSANYGQLF

SEQ ID NO: 2450 - protein, 14 aa, synthetic construct
YYQSLSGANYGQLF

SEQ ID NO: 2451 - protein, 14 aa, synthetic construct
YYQSLSGANYGQLF

SEQ ID NO: 2452 - protein, 14 aa, synthetic construct
YYQSLSSANYGQTF

SEQ ID NO: 2453 - protein, 14 aa, synthetic construct
YYQSLSSANFGQLF

SEQ ID NO: 2454 - protein, 14 aa, synthetic construct
YYQSLSSVNWGQVF

SEQ ID NO: 2455 - protein, 14 aa, synthetic construct
YYQSLSSANYGQLF

SEQ ID NO: 2456 - protein, 14 aa, synthetic construct
YYQALSTPNYGQVF

SEQ ID NO: 2457 - protein, 14 aa, synthetic construct
YYQALSTPNYGQVF

SEQ ID NO: 2458 - protein, 14 aa, synthetic construct
YYQALSTPNFGQTF

SEQ ID NO: 2459 - protein, 14 aa, synthetic construct
YYQALSTPNYGQTI

SEQ ID NO: 2460 - protein, 14 aa, synthetic construct
YYQALSTPNFGQTI

SEQ ID NO: 2461 - protein, 14 aa, synthetic construct
YYQALSTPNYGQVF

SEQ ID NO: 2462 - protein, 14 aa, synthetic construct
YYQALSSPNYGHVF

SEQ ID NO: 2463 - protein, 14 aa, synthetic construct
YYQALGSPNYGQVF

SEQ ID NO: 2464 - protein, 14 aa, synthetic construct
YYQALSSPNFGQVF

SEQ ID NO: 2465 - protein, 14 aa, synthetic construct
YDQALSTPNSGQVF

SEQ ID NO: 2466 - protein, 14 aa, synthetic construct
YYQSLSTPNYGQVS

SEQ ID NO: 2467 - protein, 14 aa, synthetic construct
YYQSLSTPNYGQVL

SEQ ID NO: 2468 - protein, 14 aa, synthetic construct
YYQALSSANYGQVF

SEQ ID NO: 2469 - protein, 14 aa, synthetic construct
YYQALSTPNFGQLF

SEQ ID NO: 2470 - protein, 14 aa, synthetic construct
FYQTLSTPNYGQVF

SEQ ID NO: 2471 - protein, 14 aa, synthetic construct
YYQALSSANYGQVF

SEQ ID NO: 2472 - protein, 14 aa, synthetic construct
YYQSLSTPNYGQVY

SEQ ID NO: 2473 - protein, 14 aa, synthetic construct
YYQALSSPTYGQPF

SEQ ID NO: 2474 - protein, 14 aa, synthetic construct
YYQALSTPNSGQTF

SEQ ID NO: 2475 - protein, 14 aa, synthetic construct
YYQALSTPNYGQTY

SEQ ID NO: 2476 - protein, 14 aa, synthetic construct
YYQAISSPNYGQVF

SEQ ID NO: 2477 - protein, 14 aa, synthetic construct
YYHALSTPNSGQVF

SEQ ID NO: 2478 - protein, 14 aa, synthetic construct
YYQALSTPKSGQVF

SEQ ID NO: 2479 - protein, 14 aa, synthetic construct
YYQALSTPHSGQVF

SEQ ID NO: 2480 - protein, 14 aa, synthetic construct
FYQPLSTPNYGQVF

SEQ ID NO: 2481 - protein, 14 aa, synthetic construct
FYQPLSTPNYGQVF

SEQ ID NO: 2482 - protein, 14 aa, synthetic construct
YYQSLSTPNYGRVF

SEQ ID NO: 2483 - protein, 14 aa, synthetic construct
YYQSLSTPNSGQVF

SEQ ID NO: 2484 - protein, 14 aa, synthetic construct
YYQSLSTPNYGQVL

SEQ ID NO: 2485 - protein, 14 aa, synthetic construct
FYQALSTPNYGQTF

SEQ ID NO: 2486 - protein, 14 aa, synthetic construct
FYQALSTPNFGQTF

SEQ ID NO: 2487 - protein, 14 aa, synthetic construct
YYQALSSPHYGQPF

SEQ ID NO: 2488 - protein, 14 aa, synthetic construct
YYQAHSSPNYGQPF

SEQ ID NO: 2489 - protein, 14 aa, synthetic construct
YYQALSSPNYGQPY

SEQ ID NO: 2490 - protein, 14 aa, synthetic construct
YYQALGSPNYGQPF

SEQ ID NO: 2491 - protein, 14 aa, synthetic construct
YYQALSSPSYGQVF

SEQ ID NO: 2492 - protein, 14 aa, synthetic construct
YYQALSAPNYSQVF

SEQ ID NO: 2493 - protein, 14 aa, synthetic construct
YYQALSSPNSGQVF

SEQ ID NO: 2494 - protein, 14 aa, synthetic construct
YYQALSSPNYGRVF

SEQ ID NO: 2495 - protein, 14 aa, synthetic construct
YDQALSTPNDGQVF

SEQ ID NO: 2496 - protein, 14 aa, synthetic construct
YYQALSTPTDGQVF

SEQ ID NO: 2497 - protein, 14 aa, synthetic construct
SYQALSTPNSGQVF

SEQ ID NO: 2498 - protein, 14 aa, synthetic construct
YDQALSTPNYGHVF

SEQ ID NO: 2499 - protein, 14 aa, synthetic construct
YYQALSTPTSGQVF

SEQ ID NO: 2500 - protein, 14 aa, synthetic construct
YYQALSTPNDGHVF

SEQ ID NO: 2501 - protein, 14 aa, synthetic construct
YSQALSTPKYGQVF

SEQ ID NO: 2502 - protein, 14 aa, synthetic construct
SYQSLSTPNYGQVF

SEQ ID NO: 2503 - protein, 14 aa, synthetic construct
LYQSLSTPNYGQVF

SEQ ID NO: 2504 - protein, 14 aa, synthetic construct
YYQSLSTPNYGQVF

SEQ ID NO: 2505 - protein, 14 aa, synthetic construct
YYQSLSTPDYGQVF

SEQ ID NO: 2506 - protein, 14 aa, synthetic construct
YYQSLSTPNSGQVF

SEQ ID NO: 2507 - protein, 14 aa, synthetic construct
YDQALSSPNYGQPF

SEQ ID NO: 2508 - protein, 14 aa, synthetic construct
YDQALSSPNSGQTF

SEQ ID NO: 2509 - protein, 14 aa, synthetic construct
YYQALRSPNSGQTF

SEQ ID NO: 2510 - protein, 14 aa, synthetic construct
YDQALSSPNDGQTF

SEQ ID NO: 2511 - protein, 14 aa, synthetic construct
YYQALRSPKYGQTF

SEQ ID NO: 2512 - protein, 14 aa, synthetic construct
YSQALSSPNSGQTF

SEQ ID NO: 2513 - protein, 14 aa, synthetic construct
YDQALSSPNYGHTF

SEQ ID NO: 2514 - protein, 14 aa, synthetic construct
YSQALSSPKYGQTF

SEQ ID NO: 2515 - protein, 14 aa, synthetic construct
YSQALSSPTYGQTF

SEQ ID NO: 2516 - protein, 14 aa, synthetic construct
YDQALRSPNYGQTF

SEQ ID NO: 2517 - protein, 14 aa, synthetic construct
YYQALRSPNYGQPF

SEQ ID NO: 2518 - protein, 14 aa, synthetic construct
YYQALGSPNYGHTF

SEQ ID NO: 2519 - protein, 14 aa, synthetic construct
YYHSLSSPSYGQVF

SEQ ID NO: 2520 - protein, 14 aa, synthetic construct
YYHSLSSPNYAQVF

SEQ ID NO: 2521 - protein, 14 aa, synthetic construct
YYHSLSSPNYGQAF

SEQ ID NO: 2522 - protein, 14 aa, synthetic construct
YSHSLSSPNYGQVF

SEQ ID NO: 2523 - protein, 14 aa, synthetic construct
YYHSLSSPKYGQVF

SEQ ID NO: 2524 - protein, 14 aa, synthetic construct
YSQSLSSANYGQVF

SEQ ID NO: 2525 - protein, 14 aa, synthetic construct
YYQALSSPKSGQTF

SEQ ID NO: 2526 - protein, 14 aa, synthetic construct
YYQALSSPNSGQPF

SEQ ID NO: 2527 - protein, 14 aa, synthetic construct
YYHALSSPNSGQTF

SEQ ID NO: 2528 - protein, 14 aa, synthetic construct
YYHALSSPNYGQPF

SEQ ID NO: 2529 - protein, 14 aa, synthetic construct
YYQALSSPTSGQTF

SEQ ID NO: 2530 - protein, 14 aa, synthetic construct
YYHSLSSPNSGQVF

SEQ ID NO: 2531 - protein, 14 aa, synthetic construct
YYQALSSPTDGQTF

SEQ ID NO: 2532 - protein, 14 aa, synthetic construct
YYQAHSSPNSGQTF

SEQ ID NO: 2533 - protein, 14 aa, synthetic construct
YYQALSSPNSGHTF

SEQ ID NO: 2534 - protein, 14 aa, synthetic construct
YYQALSSPHSGQTF

SEQ ID NO: 2535 - protein, 14 aa, synthetic construct
YYQALSSPNSGQTY

SEQ ID NO: 2536 - protein, 14 aa, synthetic construct
YYQALSSPKYGQPF

SEQ ID NO: 2537 - protein, 14 aa, synthetic construct
YYQALSSPNDGHTF

SEQ ID NO: 2538 - protein, 14 aa, synthetic construct
YYQALSSPKYGHTF

SEQ ID NO: 2539 - protein, 14 aa, synthetic construct
YYQALSSPKYGQTY

SEQ ID NO: 2540 - protein, 14 aa, synthetic construct
YYQALSSPNYSRTF

SEQ ID NO: 2541 - protein, 14 aa, synthetic construct
YYQSFSGADYGQVF

SEQ ID NO: 2542 - protein, 14 aa, synthetic construct
YYQSLSGANYGQVF

SEQ ID NO: 2543 - protein, 14 aa, synthetic construct
YYQSFSSANYGQTI

SEQ ID NO: 2544 - protein, 14 aa, synthetic construct
YYQSFSSDNYGQTF

SEQ ID NO: 2545 - protein, 14 aa, synthetic construct
YYQSFSTPNFGQTF

SEQ ID NO: 2546 - protein, 14 aa, synthetic construct
YYQSFSTPNFGQTI

SEQ ID NO: 2547 - protein, 16 aa, synthetic construct
AADSDLSTVVVGPHDY

SEQ ID NO: 2548 - protein, 16 aa, synthetic construct
AADSDLSTVVVGPHDY

SEQ ID NO: 2549 - protein, 16 aa, synthetic construct
AADSDLSTVVVGPHDY

SEQ ID NO: 2550 - protein, 16 aa, synthetic construct
AADSDLRTVGVGPHDY

SEQ ID NO: 2551 - protein, 16 aa, synthetic construct
AAESDLRTVVVGPHDY

SEQ ID NO: 2552 - protein, 16 aa, synthetic construct
AADSDLRTGVVGPHDY

SEQ ID NO: 2553 - protein, 16 aa, synthetic construct
AADSDLRTVVVGPHDS

SEQ ID NO: 2554 - protein, 16 aa, synthetic construct
VADSDLSTVVDGPHDY

SEQ ID NO: 2555 - protein, 16 aa, synthetic construct
AADSDLSTVVVGPHDY

SEQ ID NO: 2556 - protein, 16 aa, synthetic construct
AADSDLSTVVVGPHDY

SEQ ID NO: 2557 - protein, 18 aa, synthetic construct
AKDAGSWGRGPFGFDYDY

SEQ ID NO: 2558 - protein, 18 aa, synthetic construct
AKDAGSWGTGPFGYEYDY

SEQ ID NO: 2559 - protein, 18 aa, synthetic construct
AKDAGSWGTGPFGYEYDY

SEQ ID NO: 2560 - protein, 18 aa, synthetic construct
AKDAGSWGTGPFGYEYDY

SEQ ID NO: 2561 - protein, 18 aa, synthetic construct
AKDAGSWGRGPFGFDYDY

SEQ ID NO: 2562 - protein, 18 aa, synthetic construct
AKDAGSWGRGPFGFDYDY

SEQ ID NO: 2563 - protein, 18 aa, synthetic construct
AKDAGSWGRGPFGFDYDY

SEQ ID NO: 2564 - protein, 18 aa, synthetic construct
AKDAGSWGRGPFGFDYDY

SEQ ID NO: 2565 - protein, 18 aa, synthetic construct
AKDAGSWGTGPFGYEYDY

SEQ ID NO: 2566 - protein, 18 aa, synthetic construct
ANDAGGWGTGPFGYEYDY

SEQ ID NO: 2567 - protein, 18 aa, synthetic construct
AKAAGGWGTGPFGYEYDY

SEQ ID NO: 2568 - protein, 11 aa, synthetic construct
ATTPSGKAYSY

SEQ ID NO: 2569 - protein, 11 aa, synthetic construct
ATTPSGKAYSY

SEQ ID NO: 2570 - protein, 11 aa, synthetic construct
AGTPSGKAYTN

SEQ ID NO: 2571 - protein, 11 aa, synthetic construct
AVTPSGKAYSY

SEQ ID NO: 2572 - protein, 11 aa, synthetic construct
AATPSGKAFTY

SEQ ID NO: 2573 - protein, 11 aa, synthetic construct
AATPSGKAFTY

SEQ ID NO: 2574 - protein, 11 aa, synthetic construct
AATPTGKAYSY

SEQ ID NO: 2575 - protein, 11 aa, synthetic construct
AATPSGKAYTY

SEQ ID NO: 2576 - protein, 11 aa, synthetic construct
AATPTGKAYTY

SEQ ID NO: 2577 - protein, 11 aa, synthetic construct
AATPAGKAYTY

SEQ ID NO: 2578 - protein, 11 aa, synthetic construct
AATPAGKAYTY

SEQ ID NO: 2579 - protein, 11 aa, synthetic construct
AGTLSGKAYTY

SEQ ID NO: 2580 - protein, 11 aa, synthetic construct
AATPSGKAYSN

SEQ ID NO: 2581 - protein, 11 aa, synthetic construct
AATPSGRAYTY

SEQ ID NO: 2582 - protein, 11 aa, synthetic construct
AANPSGKAYTY

SEQ ID NO: 2583 - protein, 11 aa, synthetic construct
AATPSAKAYTY

SEQ ID NO: 2584 - protein, 11 aa, synthetic construct
AATPSGKADTY

SEQ ID NO: 2585 - protein, 11 aa, synthetic construct
AATPSGKANTY

SEQ ID NO: 2586 - protein, 11 aa, synthetic construct
AATPSGRAFTY

SEQ ID NO: 2587 - protein, 11 aa, synthetic construct
AATTSGKAYTY

SEQ ID NO: 2588 - protein, 11 aa, synthetic construct
AATPSGQAYTY

SEQ ID NO: 2589 - protein, 11 aa, synthetic construct
AATPSGQAYTY

SEQ ID NO: 2590 - protein, 11 aa, synthetic construct
AAPPSGKAYTY

SEQ ID NO: 2591 - protein, 11 aa, synthetic construct
AATPSGKEYTY

SEQ ID NO: 2592 - protein, 11 aa, synthetic construct
AATPSGKEYTY

SEQ ID NO: 2593 - protein, 11 aa, synthetic construct
AATPSGTAYTY

SEQ ID NO: 2594 - protein, 11 aa, synthetic construct
AAAPSGKAYTY

SEQ ID NO: 2595 - protein, 11 aa, synthetic construct
AATPSGKAYSY

SEQ ID NO: 2596 - protein, 11 aa, synthetic construct
AATPSGKAYSH

SEQ ID NO: 2597 - protein, 11 aa, synthetic construct
AATPSGKAYSN

SEQ ID NO: 2598 - protein, 11 aa, synthetic construct
AATPFGKAYSY

SEQ ID NO: 2599 - protein, 11 aa, synthetic construct
AAPPSGKAYSY

SEQ ID NO: 2600 - protein, 11 aa, synthetic construct
AGTPSGKAYSY

SEQ ID NO: 2601 - protein, 11 aa, synthetic construct
AASPSGKAYTY

SEQ ID NO: 2602 - protein, 11 aa, synthetic construct
AATHSGKAYTY

SEQ ID NO: 2603 - protein, 11 aa, synthetic construct
AATPPGKAYTY

SEQ ID NO: 2604 - protein, 11 aa, synthetic construct
AATPSGKAHTY

SEQ ID NO: 2605 - protein, 11 aa, synthetic construct
AATPSGKSYTY

SEQ ID NO: 2606 - protein, 11 aa, synthetic construct
AATPSGKVYTY

SEQ ID NO: 2607 - protein, 11 aa, synthetic construct
AATPSGMAYTY

SEQ ID NO: 2608 - protein, 11 aa, synthetic construct
AATPSGNAYTY

SEQ ID NO: 2609 - protein, 11 aa, synthetic construct
AATPSRKAYTY

SEQ ID NO: 2610 - protein, 11 aa, synthetic construct
AATPSVKAYTY

SEQ ID NO: 2611 - protein, 11 aa, synthetic construct
AATPYGKAYTY

SEQ ID NO: 2612 - protein, 11 aa, synthetic construct
AATPSGKAYTY

SEQ ID NO: 2613 - protein, 11 aa, synthetic construct
AATPSGRAYTY

SEQ ID NO: 2614 - protein, 11 aa, synthetic construct
AATPSGRAYTY

SEQ ID NO: 2615 - protein, 11 aa, synthetic construct
AAPPSGKAYTY

SEQ ID NO: 2616 - protein, 11 aa, synthetic construct
AATPSGTAYTY

SEQ ID NO: 2617 - protein, 11 aa, synthetic construct
AATLSGKAYTY

SEQ ID NO: 2618 - protein, 11 aa, synthetic construct
AATPSGEAYTY

SEQ ID NO: 2619 - protein, 11 aa, synthetic construct
AATPFGKAYTY

SEQ ID NO: 2620 - protein, 11 aa, synthetic construct
AATPSGKAYTY

SEQ ID NO: 2621 - protein, 11 aa, synthetic construct
AATPSGQAYSY

SEQ ID NO: 2622 - protein, 11 aa, synthetic construct
AATPSGEAYSY

SEQ ID NO: 2623 - protein, 11 aa, synthetic construct
TATPSGKAYSY

SEQ ID NO: 2624 - protein, 11 aa, synthetic construct
AATPSGKAYTY

SEQ ID NO: 2625 - protein, 11 aa, synthetic construct
AAIPSGKAYTY

SEQ ID NO: 2626 - protein, 11 aa, synthetic construct
AATASGKAYTY

SEQ ID NO: 2627 - protein, 11 aa, synthetic construct
AATPSGKGYTY

SEQ ID NO: 2628 - protein, 11 aa, synthetic construct
AATPSGKPYTY

SEQ ID NO: 2629 - protein, 11 aa, synthetic construct
AATRSGKAYTY

SEQ ID NO: 2630 - protein, 11 aa, synthetic construct
AATSSGKAYTY

SEQ ID NO: 2631 - protein, 11 aa, synthetic construct
AATPSGQAYTY

SEQ ID NO: 2632 - protein, 11 aa, synthetic construct
AAPPSGKAYTY

SEQ ID NO: 2633 - protein, 11 aa, synthetic construct
AATPSGKTYTY

SEQ ID NO: 2634 - protein, 11 aa, synthetic construct
AATPFGKAYTY

SEQ ID NO: 2635 - protein, 11 aa, synthetic construct
AATPSGKEYTY

SEQ ID NO: 2636 - protein, 11 aa, synthetic construct
AATPSGQAYTY

SEQ ID NO: 2637 - protein, 11 aa, synthetic construct
AATPTGKAYTY

SEQ ID NO: 2638 - protein, 11 aa, synthetic construct
AATPTGKAYTY

SEQ ID NO: 2639 - protein, 11 aa, synthetic construct
AATPSGTAYTY

SEQ ID NO: 2640 - protein, 11 aa, synthetic construct
AGTPSGKAYTY

SEQ ID NO: 2641 - protein, 11 aa, synthetic construct
AGTPSGEAYTY

SEQ ID NO: 2642 - protein, 11 aa, synthetic construct
AGTPSGKTYTY

SEQ ID NO: 2643 - protein, 11 aa, synthetic construct
AGTPSGKAYAY

SEQ ID NO: 2644 - protein, 11 aa, synthetic construct
AGTPSGKAYTY

SEQ ID NO: 2645 - protein, 11 aa, synthetic construct
AGTPSGKAYTS

SEQ ID NO: 2646 - protein, 11 aa, synthetic construct
VATPSGKAYSY

SEQ ID NO: 2647 - protein, 22 aa, synthetic construct
ATPGPYTYCAPYGSSWSRGYDY

SEQ ID NO: 2648 - protein, 22 aa, synthetic construct
ATPGPYMYCAPYGSSWSRGYDY

SEQ ID NO: 2649 - protein, 22 aa, synthetic construct
ATPGPYSYCAPYGSSWSRGYDY

SEQ ID NO: 2650 - protein, 12 aa, synthetic construct
ARVRGTPYEYGY

SEQ ID NO: 2651 - protein, 12 aa, synthetic construct
ARVRGTPYEYGY

SEQ ID NO: 2652 - protein, 12 aa, synthetic construct
ARVRGTPYDYGY

SEQ ID NO: 2653 - protein, 12 aa, synthetic construct
ARVRGTTYEYGY

SEQ ID NO: 2654 - protein, 12 aa, synthetic construct
ARVRGTQYEYGY

SEQ ID NO: 2655 - protein, 12 aa, synthetic construct
ARVRGTPSEYGY

SEQ ID NO: 2656 - protein, 12 aa, synthetic construct
ARVQGTPYEYGY

SEQ ID NO: 2657 - protein, 12 aa, synthetic construct
ARVRVTPYEYGY

SEQ ID NO: 2658 - protein, 12 aa, synthetic construct
ARVRGTPYVYGY

SEQ ID NO: 2659 - protein, 12 aa, synthetic construct
ARVLGTPYEYGY

SEQ ID NO: 2660 - protein, 12 aa, synthetic construct
ARVRGTPYEYGY

SEQ ID NO: 2661 - protein, 12 aa, synthetic construct
ARVRGTPYEYGY

SEQ ID NO: 2662 - protein, 12 aa, synthetic construct
ARVRDTPYEYGY

SEQ ID NO: 2663 - protein, 12 aa, synthetic construct
ARVRGTPFEYGY

SEQ ID NO: 2664 - protein, 12 aa, synthetic construct
ARVWGTPYEYGY

SEQ ID NO: 2665 - protein, 12 aa, synthetic construct
ARVRGKPYEYGY

SEQ ID NO: 2666 - protein, 12 aa, synthetic construct
ARVRGTPYGYGY

SEQ ID NO: 2667 - protein, 12 aa, synthetic construct
ARVRGTPYAYGY

SEQ ID NO: 2668 - protein, 12 aa, synthetic construct
ARVRGTPYGYGY

SEQ ID NO: 2669 - protein, 12 aa, synthetic construct
ARVRGTPHEYGY

SEQ ID NO: 2670 - protein, 12 aa, synthetic construct
ARVRGTPNEYGY

SEQ ID NO: 2671 - protein, 12 aa, synthetic construct
ARVRGTPYDYGY

SEQ ID NO: 2672 - protein, 12 aa, synthetic construct
ARVRGTPYDYGY

SEQ ID NO: 2673 - protein, 12 aa, synthetic construct
ARVRGPPYEYGY

SEQ ID NO: 2674 - protein, 12 aa, synthetic construct
ARVRGTPYKYGY

SEQ ID NO: 2675 - protein, 12 aa, synthetic construct
ARVRGTPYDYGY

SEQ ID NO: 2676 - protein, 12 aa, synthetic construct
ARVRGTPYDYGY

SEQ ID NO: 2677 - protein, 12 aa, synthetic construct
ARVRGTRYEYGY

SEQ ID NO: 2678 - protein, 12 aa, synthetic construct
ARVRGTPYDYAY

SEQ ID NO: 2679 - protein, 12 aa, synthetic construct
ARVRGTPYDYGY

SEQ ID NO: 2680 - protein, 12 aa, synthetic construct
ARVRGTPDEYGY

SEQ ID NO: 2681 - protein, 12 aa, synthetic construct
ARVRGSPYDYNY

SEQ ID NO: 2682 - protein, 12 aa, synthetic construct
ARVGGAPYEYNY

SEQ ID NO: 2683 - protein, 12 aa, synthetic construct
ARVGGAPYEYNY

SEQ ID NO: 2684 - protein, 12 aa, synthetic construct
ARVRGSPYEYNY

SEQ ID NO: 2685 - protein, 12 aa, synthetic construct
ARVRGSPYEYNY

SEQ ID NO: 2686 - protein, 12 aa, synthetic construct
ARVRGAPYEYNY

SEQ ID NO: 2687 - protein, 12 aa, synthetic construct
ARVGGAPYEYNY

SEQ ID NO: 2688 - protein, 12 aa, synthetic construct
ARVGGAPYEYNY

SEQ ID NO: 2689 - protein, 12 aa, synthetic construct
ARVRGSPYEYNY

SEQ ID NO: 2690 - protein, 12 aa, synthetic construct
ARVRGAPYEYGY

SEQ ID NO: 2691 - protein, 12 aa, synthetic construct
ARVRGAPYEYNY

SEQ ID NO: 2692 - protein, 12 aa, synthetic construct
ARVGGTPYEYGY

SEQ ID NO: 2693 - protein, 12 aa, synthetic construct
ARVGGAPYEYNY

SEQ ID NO: 2694 - protein, 12 aa, synthetic construct
ARVGGTPYEYGY

SEQ ID NO: 2695 - protein, 12 aa, synthetic construct
ARVGGAPYEYNY

SEQ ID NO: 2696 - protein, 12 aa, synthetic construct
ARVRGSPYEYNY

SEQ ID NO: 2697 - protein, 12 aa, synthetic construct
ARVRGSPYEYNY

SEQ ID NO: 2698 - protein, 12 aa, synthetic construct
ARVRGSPYGYNY

SEQ ID NO: 2699 - protein, 12 aa, synthetic construct
ARVRGSPYGYNY

SEQ ID NO: 2700 - protein, 11 aa, synthetic construct
AAAPTGRAFTY

SEQ ID NO: 2701 - protein, 11 aa, synthetic construct
TASPTGRAFTY

SEQ ID NO: 2702 - protein, 11 aa, synthetic construct
TAAPTGRAFAY

SEQ ID NO: 2703 - protein, 11 aa, synthetic construct
TAAPTGRAFAY

SEQ ID NO: 2704 - protein, 11 aa, synthetic construct
TASPTGRAFTY

SEQ ID NO: 2705 - protein, 11 aa, synthetic construct
TAAPTRRAFAY

SEQ ID NO: 2706 - protein, 11 aa, synthetic construct
TAAPTRRAFAY

SEQ ID NO: 2707 - protein, 11 aa, synthetic construct
TAAPTRRAFAY

SEQ ID NO: 2708 - protein, 11 aa, synthetic construct
AAAPTGRSFAY

SEQ ID NO: 2709 - protein, 11 aa, synthetic construct
TAAPTGRAFAY

SEQ ID NO: 2710 - protein, 11 aa, synthetic construct
AAAPTGRAFTY

SEQ ID NO: 2711 - protein, 11 aa, synthetic construct
AAAPTGRAFTY

SEQ ID NO: 2712 - protein, 11 aa, synthetic construct
AAAPTGRAFTY

SEQ ID NO: 2713 - protein, 11 aa, synthetic construct
TAAPTVRAFAY

SEQ ID NO: 2714 - protein, 11 aa, synthetic construct
TASPTGRAFTY

SEQ ID NO: 2715 - protein, 11 aa, synthetic construct
TASPTGRAFTY

SEQ ID NO: 2716 - protein, 11 aa, synthetic construct
TAAPTGRAFAY

SEQ ID NO: 2717 - protein, 11 aa, synthetic construct
TAAPAGRAFAY

SEQ ID NO: 2718 - protein, 11 aa, synthetic construct
TAAPTGRAFAY

SEQ ID NO: 2719 - protein, 11 aa, synthetic construct
TAAPTGRAFAY

SEQ ID NO: 2720 - protein, 11 aa, synthetic construct
TAAPTGRAFDH

SEQ ID NO: 2721 - protein, 11 aa, synthetic construct
AAAPTGRAFNY

SEQ ID NO: 2722 - protein, 11 aa, synthetic construct
AAAPTGKAFTY

SEQ ID NO: 2723 - protein, 11 aa, synthetic construct
AAAPTGQAFNI

SEQ ID NO: 2724 - protein, 11 aa, synthetic construct
AAAPTGQAFNY

SEQ ID NO: 2725 - protein, 11 aa, synthetic construct
AAAPTGKAFNY

SEQ ID NO: 2726 - protein, 7 aa, synthetic construct
AGSAFDF

SEQ ID NO: 2727 - protein, 10 aa, synthetic construct
SVLGRDMMTY

SEQ ID NO: 2728 - protein, 10 aa, synthetic construct
SVVGRDMVTY

SEQ ID NO: 2729 - protein, 10 aa, synthetic construct
SVVGRDMMTY

SEQ ID NO: 2730 - protein, 10 aa, synthetic construct
SVVGRDMMTY

SEQ ID NO: 2731 - protein, 10 aa, synthetic construct
SVLGRDMMTY

SEQ ID NO: 2732 - protein, 10 aa, synthetic construct
SMVGRDMMTY

SEQ ID NO: 2733 - protein, 10 aa, synthetic construct
SMVGRDMMTY

SEQ ID NO: 2734 - protein, 10 aa, synthetic construct
SVVGRDMMTY

SEQ ID NO: 2735 - protein, 10 aa, synthetic construct
SVIGRDMMTY

SEQ ID NO: 2736 - protein, 10 aa, synthetic construct
YMVGRDMMTY

SEQ ID NO: 2737 - protein, 10 aa, synthetic construct
SMLGRDMMTY

SEQ ID NO: 2738 - protein, 10 aa, synthetic construct
SLVGRDMMTY

SEQ ID NO: 2739 - protein, 10 aa, synthetic construct
SVLGRDMMTY

SEQ ID NO: 2740 - protein, 10 aa, synthetic construct
SVRGRDMMTY

SEQ ID NO: 2741 - protein, 10 aa, synthetic construct
SRVGRDMMTY

SEQ ID NO: 2742 - protein, 10 aa, synthetic construct
SMVGRDMRTY

SEQ ID NO: 2743 - protein, 10 aa, synthetic construct
SALGRDMMTY

SEQ ID NO: 2744 - protein, 10 aa, synthetic construct
SMVGRDMMTD

SEQ ID NO: 2745 - protein, 10 aa, synthetic construct
SMVGRDMMTY

SEQ ID NO: 2746 - protein, 10 aa, synthetic construct
SELGRDMMTY

SEQ ID NO: 2747 - protein, 10 aa, synthetic construct
SMVGRDMMTY

SEQ ID NO: 2748 - protein, 10 aa, synthetic construct
SMLGRDMMTY

SEQ ID NO: 2749 - protein, 10 aa, synthetic construct
SMVGRDMMTY

SEQ ID NO: 2750 - protein, 10 aa, synthetic construct
SVVGRDMVTY

SEQ ID NO: 2751 - protein, 10 aa, synthetic construct
SVPGRDMMTY

SEQ ID NO: 2752 - protein, 10 aa, synthetic construct
SVLGRDMMTY

SEQ ID NO: 2753 - protein, 10 aa, synthetic construct
SVVGRDMVTY

SEQ ID NO: 2754 - protein, 10 aa, synthetic construct
SVLGRDMMTY

SEQ ID NO: 2755 - protein, 10 aa, synthetic construct
SMLGRDMMTY

SEQ ID NO: 2756 - protein, 10 aa, synthetic construct
SVIGRDMMTY

SEQ ID NO: 2757 - protein, 10 aa, synthetic construct
YMVGRDMMTY

SEQ ID NO: 2758 - protein, 10 aa, synthetic construct
SLLGRDMMTY

SEQ ID NO: 2759 - protein, 10 aa, synthetic construct
SGLGRDMMTY

SEQ ID NO: 2760 - protein, 10 aa, synthetic construct
SMVGRDMLTY

SEQ ID NO: 2761 - protein, 10 aa, synthetic construct
SMVGRDLMTY

SEQ ID NO: 2762 - protein, 10 aa, synthetic construct
SMGGRDMMTY

SEQ ID NO: 2763 - protein, 10 aa, synthetic construct
SIVGRDMMTY

SEQ ID NO: 2764 - protein, 10 aa, synthetic construct
SMVVRDMMTY

SEQ ID NO: 2765 - protein, 10 aa, synthetic construct
TMVGRDMMTY

SEQ ID NO: 2766 - protein, 10 aa, synthetic construct
SMVGSDMMTY

SEQ ID NO: 2767 - protein, 10 aa, synthetic construct
SVLGRDKMTY

SEQ ID NO: 2768 - protein, 10 aa, synthetic construct
SVLGGDMMTY

SEQ ID NO: 2769 - protein, 10 aa, synthetic construct
YVLGRDMMTY

SEQ ID NO: 2770 - protein, 10 aa, synthetic construct
SVLGRDMMTD

SEQ ID NO: 2771 - protein, 10 aa, synthetic construct
SVLGSDMMTY

SEQ ID NO: 2772 - protein, 10 aa, synthetic construct
SVLGSDMMTY

SEQ ID NO: 2773 - protein, 10 aa, synthetic construct
SVLGSDMMTY

SEQ ID NO: 2774 - protein, 10 aa, synthetic construct
SVLGGDMMTY

SEQ ID NO: 2775 - protein, 10 aa, synthetic construct
SVLGGDMMTY

SEQ ID NO: 2776 - protein, 10 aa, synthetic construct
SVLGRDMRTY

SEQ ID NO: 2777 - protein, 10 aa, synthetic construct
AVLGRDMMTY

SEQ ID NO: 2778 - protein, 10 aa, synthetic construct
SVLGRDMLTY

SEQ ID NO: 2779 - protein, 10 aa, synthetic construct
SVLGRDLMTY

SEQ ID NO: 2780 - protein, 10 aa, synthetic construct
SVLVRDMMTY

SEQ ID NO: 2781 - protein, 10 aa, synthetic construct
SVLGRDRMTY

SEQ ID NO: 2782 - protein, 10 aa, synthetic construct
SVLGRYMMTY

SEQ ID NO: 2783 - protein, 10 aa, synthetic construct
SVLGRDMMTS

SEQ ID NO: 2784 - protein, 10 aa, synthetic construct
SVLGRDMMAY

SEQ ID NO: 2785 - protein, 10 aa, synthetic construct
SVLGRDMMPY

SEQ ID NO: 2786 - protein, 10 aa, synthetic construct
SVLGRDMITY

SEQ ID NO: 2787 - protein, 10 aa, synthetic construct
TVLGRDMMTY

SEQ ID NO: 2788 - protein, 10 aa, synthetic construct
SVLGRDKMTY

SEQ ID NO: 2789 - protein, 10 aa, synthetic construct
YVLGRDMMTY

SEQ ID NO: 2790 - protein, 10 aa, synthetic construct
SVLGRDMMTH

SEQ ID NO: 2791 - protein, 10 aa, synthetic construct
FVLGRDMMTY

SEQ ID NO: 2792 - protein, 10 aa, synthetic construct
SVLGRDMRTY

SEQ ID NO: 2793 - protein, 10 aa, synthetic construct
YVLGRDMMTY

SEQ ID NO: 2794 - protein, 10 aa, synthetic construct
SVLGRDKMTY

SEQ ID NO: 2795 - protein, 10 aa, synthetic construct
SVLGRDMMTD

SEQ ID NO: 2796 - protein, 10 aa, synthetic construct
SVLGRDMMTD

SEQ ID NO: 2797 - protein, 10 aa, synthetic construct
AVLGRDMMTY

SEQ ID NO: 2798 - protein, 10 aa, synthetic construct
SVLGREMMTY

SEQ ID NO: 2799 - protein, 10 aa, synthetic construct
SVLGRVMMTY

SEQ ID NO: 2800 - protein, 10 aa, synthetic construct
SVLGRDMMSY

SEQ ID NO: 2801 - protein, 10 aa, synthetic construct
SVLGRDMMKY

SEQ ID NO: 2802 - protein, 10 aa, synthetic construct
SVLGIDMMTY

SEQ ID NO: 2803 - protein, 10 aa, synthetic construct
SVLRRDMMTY

SEQ ID NO: 2804 - protein, 10 aa, synthetic construct
SVLGRDMVTY

SEQ ID NO: 2805 - protein, 120 aa, synthetic construct; identical to SEQ ID NO: 93

SEQ ID NO: 2806 - protein, 120 aa, synthetic construct; identical to SEQ ID NO: 94

SEQ ID NO: 2807 - protein, 120 aa, synthetic construct; identical to SEQ ID NO: 95

SEQ ID NO: 2808 - protein, 120 aa, synthetic construct; identical to SEQ ID NO: 4

SEQ ID NO: 2809 - protein, 120 aa, synthetic construct; identical to SEQ ID NO: 96

SEQ ID NO: 2810 - protein, 120 aa, synthetic construct; identical to SEQ ID NO: 7

SEQ ID NO: 2811 - protein, 120 aa, synthetic construct; identical to SEQ ID NO: 97

SEQ ID NO: 2812 - protein, 120 aa, synthetic construct; identical to SEQ ID NO: 98

SEQ ID NO: 2813 - protein, 120 aa, synthetic construct; identical to SEQ ID NO: 99

SEQ ID NO: 2814 - protein, 120 aa, synthetic construct; identical to SEQ ID NO: 100

SEQ ID NO: 2815 - protein, 120 aa, synthetic construct; identical to SEQ ID NO: 101

SEQ ID NO: 2816 - protein, 120 aa, synthetic construct; identical to SEQ ID NO: 102

SEQ ID NO: 2817 - protein, 120 aa, synthetic construct; identical to SEQ ID NO: 103

SEQ ID NO: 2818 - protein, 120 aa, synthetic construct; identical to SEQ ID NO: 104

SEQ ID NO: 2819 - protein, 120 aa, synthetic construct; identical to SEQ ID NO: 105

SEQ ID NO: 2820 - protein, 120 aa, synthetic construct; identical to SEQ ID NO: 106

SEQ ID NO: 2821 - protein, 120 aa, synthetic construct; identical to SEQ ID NO: 107

SEQ ID NO: 2822 - protein, 120 aa, synthetic construct; identical to SEQ ID NO: 108

SEQ ID NO: 2823 - protein, 120 aa, synthetic construct; identical to SEQ ID NO: 109

SEQ ID NO: 2824 - protein, 120 aa, synthetic construct; identical to SEQ ID NO: 110

SEQ ID NO: 2825 - protein, 120 aa, synthetic construct; identical to SEQ ID NO: 111

SEQ ID NO: 2826 - protein, 120 aa, synthetic construct; identical to SEQ ID NO: 112

SEQ ID NO: 2827 - protein, 120 aa, synthetic construct; identical to SEQ ID NO: 113

SEQ ID NO: 2828 - protein, 120 aa, synthetic construct; identical to SEQ ID NO: 114

SEQ ID NO: 2829 - protein, 120 aa, synthetic construct; identical to SEQ ID NO: 115

SEQ ID NO: 2830 - protein, 120 aa, synthetic construct; identical to SEQ ID NO: 116

SEQ ID NO: 2831 - protein, 120 aa, synthetic construct; identical to SEQ ID NO: 117

SEQ ID NO: 2832 - protein, 120 aa, synthetic construct; identical to SEQ ID NO: 118

SEQ ID NO: 2833 - protein, 120 aa, synthetic construct; identical to SEQ ID NO: 119

SEQ ID NO: 2834 - protein, 120 aa, synthetic construct; identical to SEQ ID NO: 120

SEQ ID NO: 2835 - protein, 120 aa, synthetic construct; identical to SEQ ID NO: 121

SEQ ID NO: 2836 - protein, 120 aa, synthetic construct; identical to SEQ ID NO: 122

SEQ ID NO: 2837 - protein, 120 aa, synthetic construct; identical to SEQ ID NO: 123

SEQ ID NO: 2838 - protein, 120 aa, synthetic construct; identical to SEQ ID NO: 124

SEQ ID NO: 2839 - protein, 120 aa, synthetic construct; identical to SEQ ID NO: 125

SEQ ID NO: 2840 - protein, 120 aa, synthetic construct; identical to SEQ ID NO: 126

SEQ ID NO: 2841 - protein, 120 aa, synthetic construct; identical to SEQ ID NO: 127

SEQ ID NO: 2842 - protein, 120 aa, synthetic construct; identical to SEQ ID NO: 128

SEQ ID NO: 2843 - protein, 120 aa, synthetic construct; identical to SEQ ID NO: 129

SEQ ID NO: 2844 - protein, 120 aa, synthetic construct; identical to SEQ ID NO: 130

SEQ ID NO: 2845 - protein, 120 aa, synthetic construct; identical to SEQ ID NO: 131

SEQ ID NO: 2846 - protein, 120 aa, synthetic construct; identical to SEQ ID NO: 132

SEQ ID NO: 2847 - protein, 120 aa, synthetic construct; identical to SEQ ID NO: 133

SEQ ID NO: 2848 - protein, 120 aa, synthetic construct; identical to SEQ ID NO: 134

SEQ ID NO: 2849 - protein, 120 aa, synthetic construct; identical to SEQ ID NO: 135

SEQ ID NO: 2850 - protein, 120 aa, synthetic construct; identical to SEQ ID NO: 136

SEQ ID NO: 2851 - protein, 120 aa, synthetic construct; identical to SEQ ID NO: 137

SEQ ID NO: 2852 - protein, 120 aa, synthetic construct; identical to SEQ ID NO: 138

SEQ ID NO: 2853 - protein, 120 aa, synthetic construct; identical to SEQ ID NO: 139

SEQ ID NO: 2854 - protein, 120 aa, synthetic construct; identical to SEQ ID NO: 140

SEQ ID NO: 2855 - protein, 120 aa, synthetic construct; identical to SEQ ID NO: 141

SEQ ID NO: 2856 - protein, 120 aa, synthetic construct; identical to SEQ ID NO: 142

SEQ ID NO: 2857 - protein, 120 aa, synthetic construct; identical to SEQ ID NO: 143

SEQ ID NO: 2858 - protein, 120 aa, synthetic construct; identical to SEQ ID NO: 144

SEQ ID NO: 2859 - protein, 120 aa, synthetic construct; identical to SEQ ID NO: 145

SEQ ID NO: 2860 - protein, 120 aa, synthetic construct; identical to SEQ ID NO: 146

SEQ ID NO: 2861 - protein, 120 aa, synthetic construct; identical to SEQ ID NO: 147

SEQ ID NO: 2862 - protein, 120 aa, synthetic construct; identical to SEQ ID NO: 148

SEQ ID NO: 2863 - protein, 120 aa, synthetic construct; identical to SEQ ID NO: 149

SEQ ID NO: 2864 - protein, 120 aa, synthetic construct; identical to SEQ ID NO: 150

SEQ ID NO: 2865 - protein, 120 aa, synthetic construct; identical to SEQ ID NO: 151

SEQ ID NO: 2866 - protein, 120 aa, synthetic construct; identical to SEQ ID NO: 152

SEQ ID NO: 2867 - protein, 120 aa, synthetic construct; identical to SEQ ID NO: 153

SEQ ID NO: 2868 - protein, 120 aa, synthetic construct; identical to SEQ ID NO: 154

SEQ ID NO: 2869 - protein, 120 aa, synthetic construct; identical to SEQ ID NO: 155

SEQ ID NO: 2870 - protein, 120 aa, synthetic construct; identical to SEQ ID NO: 156

SEQ ID NO: 2871 - protein, 120 aa, synthetic construct; identical to SEQ ID NO: 157

SEQ ID NO: 2872 - protein, 120 aa, synthetic construct; identical to SEQ ID NO: 158

SEQ ID NO: 2873 - protein, 120 aa, synthetic construct; identical to SEQ ID NO: 159

SEQ ID NO: 2874 - protein, 120 aa, synthetic construct; identical to SEQ ID NO: 160

SEQ ID NO: 2875 - protein, 120 aa, synthetic construct; identical to SEQ ID NO: 161

SEQ ID NO: 2876 - protein, 120 aa, synthetic construct; identical to SEQ ID NO: 162

SEQ ID NO: 2877 - protein, 120 aa, synthetic construct; identical to SEQ ID NO: 163

SEQ ID NO: 2878 - protein, 120 aa, synthetic construct; identical to SEQ ID NO: 164

SEQ ID NO: 2879 - protein, 120 aa, synthetic construct; identical to SEQ ID NO: 165

SEQ ID NO: 2880 - protein, 120 aa, synthetic construct; identical to SEQ ID NO: 166

SEQ ID NO: 2881 - protein, 120 aa, synthetic construct; identical to SEQ ID NO: 167

SEQ ID NO: 2882 - protein, 120 aa, synthetic construct; identical to SEQ ID NO: 168

SEQ ID NO: 2883 - protein, 120 aa, synthetic construct; identical to SEQ ID NO: 169

SEQ ID NO: 2884 - protein, 120 aa, synthetic construct; identical to SEQ ID NO: 170

SEQ ID NO: 2885 - protein, 120 aa, synthetic construct; identical to SEQ ID NO: 171

SEQ ID NO: 2886 - protein, 120 aa, synthetic construct; identical to SEQ ID NO: 172

SEQ ID NO: 2887 - protein, 120 aa, synthetic construct; identical to SEQ ID NO: 173

SEQ ID NO: 2888 - protein, 120 aa, synthetic construct; identical to SEQ ID NO: 174

SEQ ID NO: 2889 - protein, 120 aa, synthetic construct; identical to SEQ ID NO: 175

SEQ ID NO: 2890 - protein, 120 aa, synthetic construct; identical to SEQ ID NO: 176

SEQ ID NO: 2891 - protein, 120 aa, synthetic construct; identical to SEQ ID NO: 177

SEQ ID NO: 2892 - protein, 120 aa, synthetic construct; identical to SEQ ID NO: 178

SEQ ID NO: 2893 - protein, 120 aa, synthetic construct; identical to SEQ ID NO: 179

SEQ ID NO: 2894 - protein, 120 aa, synthetic construct; identical to SEQ ID NO: 180

SEQ ID NO: 2895 - protein, 120 aa, synthetic construct; identical to SEQ ID NO: 181

SEQ ID NO: 2896 - protein, 120 aa, synthetic construct; identical to SEQ ID NO: 182

SEQ ID NO: 2897 - protein, 120 aa, synthetic construct; identical to SEQ ID NO: 183

SEQ ID NO: 2898 - protein, 120 aa, synthetic construct; identical to SEQ ID NO: 184

SEQ ID NO: 2899 - protein, 120 aa, synthetic construct; identical to SEQ ID NO: 185

SEQ ID NO: 2900 - protein, 120 aa, synthetic construct; identical to SEQ ID NO: 186

SEQ ID NO: 2901 - protein, 120 aa, synthetic construct; identical to SEQ ID NO: 187

SEQ ID NO: 2902 - protein, 120 aa, synthetic construct; identical to SEQ ID NO: 188

SEQ ID NO: 2903 - protein, 120 aa, synthetic construct; identical to SEQ ID NO: 189

SEQ ID NO: 2904 - protein, 120 aa, synthetic construct; identical to SEQ ID NO: 190

SEQ ID NO: 2905 - protein, 120 aa, synthetic construct; identical to SEQ ID NO: 191

SEQ ID NO: 2906 - protein, 120 aa, synthetic construct; identical to SEQ ID NO: 192

SEQ ID NO: 2907 - protein, 120 aa, synthetic construct; identical to SEQ ID NO: 193

SEQ ID NO: 2908 - protein, 120 aa, synthetic construct; identical to SEQ ID NO: 194

SEQ ID NO: 2909 - protein, 120 aa, synthetic construct; identical to SEQ ID NO: 195

SEQ ID NO: 2910 - protein, 120 aa, synthetic construct; identical to SEQ ID NO: 196

SEQ ID NO: 2911 - protein, 120 aa, synthetic construct; identical to SEQ ID NO: 197

SEQ ID NO: 2912 - protein, 120 aa, synthetic construct; identical to SEQ ID NO: 198

SEQ ID NO: 2913 - protein, 120 aa, synthetic construct; identical to SEQ ID NO: 199

SEQ ID NO: 2914 - protein, 120 aa, synthetic construct; identical to SEQ ID NO: 200

SEQ ID NO: 2915 - protein, 120 aa, synthetic construct; identical to SEQ ID NO: 201

SEQ ID NO: 2916 - protein, 120 aa, synthetic construct; identical to SEQ ID NO: 202

SEQ ID NO: 2917 - protein, 120 aa, synthetic construct; identical to SEQ ID NO: 203

SEQ ID NO: 2918 - protein, 120 aa, synthetic construct; identical to SEQ ID NO: 204

SEQ ID NO: 2919 - protein, 120 aa, synthetic construct; identical to SEQ ID NO: 205

SEQ ID NO: 2920 - protein, 120 aa, synthetic construct; identical to SEQ ID NO: 206

SEQ ID NO: 2921 - protein, 120 aa, synthetic construct; identical to SEQ ID NO: 207

SEQ ID NO: 2922 - protein, 120 aa, synthetic construct; identical to SEQ ID NO: 208

SEQ ID NO: 2923 - protein, 120 aa, synthetic construct; identical to SEQ ID NO: 209

SEQ ID NO: 2924 - protein, 120 aa, synthetic construct; identical to SEQ ID NO: 210

SEQ ID NO: 2925 - protein, 120 aa, synthetic construct; identical to SEQ ID NO: 211

SEQ ID NO: 2926 - protein, 120 aa, synthetic construct; identical to SEQ ID NO: 212

SEQ ID NO: 2927 - protein, 120 aa, synthetic construct; identical to SEQ ID NO: 213

SEQ ID NO: 2928 - protein, 120 aa, synthetic construct; identical to SEQ ID NO: 214

SEQ ID NO: 2929 - protein, 120 aa, synthetic construct; identical to SEQ ID NO: 215

SEQ ID NO: 2930 - protein, 120 aa, synthetic construct; identical to SEQ ID NO: 216

SEQ ID NO: 2931 - protein, 120 aa, synthetic construct; identical to SEQ ID NO: 217

SEQ ID NO: 2932 - protein, 120 aa, synthetic construct; identical to SEQ ID NO: 218

SEQ ID NO: 2933 - protein, 120 aa, synthetic construct; identical to SEQ ID NO: 219

SEQ ID NO: 2934 - protein, 120 aa, synthetic construct; identical to SEQ ID NO: 220

SEQ ID NO: 2935 - protein, 120 aa, synthetic construct; identical to SEQ ID NO: 221

SEQ ID NO: 2936 - protein, 120 aa, synthetic construct; identical to SEQ ID NO: 222

SEQ ID NO: 2937 - protein, 120 aa, synthetic construct; identical to SEQ ID NO: 223

SEQ ID NO: 2938 - protein, 120 aa, synthetic construct; identical to SEQ ID NO: 224

SEQ ID NO: 2939 - protein, 120 aa, synthetic construct; identical to SEQ ID NO: 225

SEQ ID NO: 2940 - protein, 120 aa, synthetic construct; identical to SEQ ID NO: 226

SEQ ID NO: 2941 - protein, 120 aa, synthetic construct; identical to SEQ ID NO: 227

SEQ ID NO: 2942 - protein, 120 aa, synthetic construct; identical to SEQ ID NO: 228

SEQ ID NO: 2943 - protein, 120 aa, synthetic construct; identical to SEQ ID NO: 229

SEQ ID NO: 2944 - protein, 120 aa, synthetic construct; identical to SEQ ID NO: 230

SEQ ID NO: 2945 - protein, 120 aa, synthetic construct; identical to SEQ ID NO: 231

SEQ ID NO: 2946 - protein, 120 aa, synthetic construct; identical to SEQ ID NO: 232

SEQ ID NO: 2947 - protein, 120 aa, synthetic construct; identical to SEQ ID NO: 233

SEQ ID NO: 2948 - protein, 120 aa, synthetic construct; identical to SEQ ID NO: 234

SEQ ID NO: 2949 - protein, 120 aa, synthetic construct; identical to SEQ ID NO: 235

SEQ ID NO: 2950 - protein, 120 aa, synthetic construct; identical to SEQ ID NO: 236

SEQ ID NO: 2951 - protein, 120 aa, synthetic construct; identical to SEQ ID NO: 237

SEQ ID NO: 2952 - protein, 120 aa, synthetic construct; identical to SEQ ID NO: 238

SEQ ID NO: 2953 - protein, 120 aa, synthetic construct; identical to SEQ ID NO: 239

SEQ ID NO: 2954 - protein, 120 aa, synthetic construct; identical to SEQ ID NO: 240

SEQ ID NO: 2955 - protein, 120 aa, synthetic construct; identical to SEQ ID NO: 241

SEQ ID NO: 2956 - protein, 120 aa, synthetic construct; identical to SEQ ID NO: 242

SEQ ID NO: 2957 - protein, 120 aa, synthetic construct; identical to SEQ ID NO: 243

SEQ ID NO: 2958 - protein, 120 aa, synthetic construct; identical to SEQ ID NO: 244

SEQ ID NO: 2959 - protein, 120 aa, synthetic construct; identical to SEQ ID NO: 245

SEQ ID NO: 2960 - protein, 120 aa, synthetic construct; identical to SEQ ID NO: 246

SEQ ID NO: 2961 - protein, 120 aa, synthetic construct; identical to SEQ ID NO: 247

SEQ ID NO: 2962 - protein, 120 aa, synthetic construct; identical to SEQ ID NO: 248

SEQ ID NO: 2963 - protein, 120 aa, synthetic construct; identical to SEQ ID NO: 249

SEQ ID NO: 2964 - protein, 120 aa, synthetic construct; identical to SEQ ID NO: 250

SEQ ID NO: 2965 - protein, 120 aa, synthetic construct; identical to SEQ ID NO: 251

SEQ ID NO: 2966 - protein, 120 aa, synthetic construct; identical to SEQ ID NO: 252

SEQ ID NO: 2967 - protein, 120 aa, synthetic construct; identical to SEQ ID NO: 253

SEQ ID NO: 2968 - protein, 120 aa, synthetic construct; identical to SEQ ID NO: 254

SEQ ID NO: 2969 - protein, 120 aa, synthetic construct; identical to SEQ ID NO: 255

SEQ ID NO: 2970 - protein, 120 aa, synthetic construct; identical to SEQ ID NO: 256

SEQ ID NO: 2971 - protein, 120 aa, synthetic construct; identical to SEQ ID NO: 257

SEQ ID NO: 2972 - protein, 120 aa, synthetic construct; identical to SEQ ID NO: 258

SEQ ID NO: 2973 - protein, 120 aa, synthetic construct; identical to SEQ ID NO: 259

SEQ ID NO: 2974 - protein, 120 aa, synthetic construct; identical to SEQ ID NO: 260

SEQ ID NO: 2975 - protein, 120 aa, synthetic construct; identical to SEQ ID NO: 261

SEQ ID NO: 2976 - protein, 120 aa, synthetic construct; identical to SEQ ID NO: 262

SEQ ID NO: 2977 - protein, 120 aa, synthetic construct; identical to SEQ ID NO: 263

SEQ ID NO: 2978 - protein, 120 aa, synthetic construct; identical to SEQ ID NO: 264

SEQ ID NO: 2979 - protein, 120 aa, synthetic construct; identical to SEQ ID NO: 265

SEQ ID NO: 2980 - protein, 120 aa, synthetic construct; identical to SEQ ID NO: 266

SEQ ID NO: 2981 - protein, 120 aa, synthetic construct; identical to SEQ ID NO: 267

SEQ ID NO: 2982 - protein, 120 aa, synthetic construct; identical to SEQ ID NO: 268

SEQ ID NO: 2983 - protein, 120 aa, synthetic construct; identical to SEQ ID NO: 269

SEQ ID NO: 2984 - protein, 120 aa, synthetic construct; identical to SEQ ID NO: 270

SEQ ID NO: 2985 - protein, 120 aa, synthetic construct; identical to SEQ ID NO: 271

SEQ ID NO: 2986 - protein, 120 aa, synthetic construct; identical to SEQ ID NO: 272

SEQ ID NO: 2987 - protein, 120 aa, synthetic construct; identical to SEQ ID NO: 273

SEQ ID NO: 2988 - protein, 120 aa, synthetic construct; identical to SEQ ID NO: 274

SEQ ID NO: 2989 - protein, 120 aa, synthetic construct; identical to SEQ ID NO: 275

SEQ ID NO: 2990 - protein, 120 aa, synthetic construct; identical to SEQ ID NO: 276

SEQ ID NO: 2991 - protein, 120 aa, synthetic construct; identical to SEQ ID NO: 277

SEQ ID NO: 2992 - protein, 120 aa, synthetic construct; identical to SEQ ID NO: 278

SEQ ID NO: 2993 - protein, 120 aa, synthetic construct; identical to SEQ ID NO: 279

SEQ ID NO: 2994 - protein, 120 aa, synthetic construct; identical to SEQ ID NO: 280

SEQ ID NO: 2995 - protein, 120 aa, synthetic construct; identical to SEQ ID NO: 281

SEQ ID NO: 2996 - protein, 120 aa, synthetic construct; identical to SEQ ID NO: 282

SEQ ID NO: 2997 - protein, 120 aa, synthetic construct; identical to SEQ ID NO: 283

SEQ ID NO: 2998 - protein, 120 aa, synthetic construct; identical to SEQ ID NO: 284

SEQ ID NO: 2999 - protein, 120 aa, synthetic construct; identical to SEQ ID NO: 285

SEQ ID NO: 3000 - protein, 120 aa, synthetic construct; identical to SEQ ID NO: 286

SEQ ID NO: 3001 - protein, 120 aa, synthetic construct; identical to SEQ ID NO: 287

SEQ ID NO: 3002 - protein, 120 aa, synthetic construct; identical to SEQ ID NO: 288

SEQ ID NO: 3003 - protein, 120 aa, synthetic construct; identical to SEQ ID NO: 289

SEQ ID NO: 3004 - protein, 120 aa, synthetic construct; identical to SEQ ID NO: 290

SEQ ID NO: 3005 - protein, 120 aa, synthetic construct; identical to SEQ ID NO: 291

SEQ ID NO: 3006 - protein, 120 aa, synthetic construct; identical to SEQ ID NO: 292

SEQ ID NO: 3007 - protein, 120 aa, synthetic construct; identical to SEQ ID NO: 293

SEQ ID NO: 3008 - protein, 120 aa, synthetic construct; identical to SEQ ID NO: 294

SEQ ID NO: 3009 - protein, 120 aa, synthetic construct; identical to SEQ ID NO: 295

SEQ ID NO: 3010 - protein, 120 aa, synthetic construct; identical to SEQ ID NO: 296

SEQ ID NO: 3011 - protein, 120 aa, synthetic construct; identical to SEQ ID NO: 297

SEQ ID NO: 3012 - protein, 120 aa, synthetic construct; identical to SEQ ID NO: 298

SEQ ID NO: 3013 - protein, 120 aa, synthetic construct; identical to SEQ ID NO: 299

SEQ ID NO: 3014 - protein, 120 aa, synthetic construct; identical to SEQ ID NO: 300

SEQ ID NO: 3015 - protein, 120 aa, synthetic construct; identical to SEQ ID NO: 301

SEQ ID NO: 3016 - protein, 120 aa, synthetic construct; identical to SEQ ID NO: 302

SEQ ID NO: 3017 - protein, 120 aa, synthetic construct; identical to SEQ ID NO: 303

SEQ ID NO: 3018 - protein, 120 aa, synthetic construct; identical to SEQ ID NO: 304

SEQ ID NO: 3019 - protein, 120 aa, synthetic construct; identical to SEQ ID NO: 305

SEQ ID NO: 3020 - protein, 120 aa, synthetic construct; identical to SEQ ID NO: 306

SEQ ID NO: 3021 - protein, 120 aa, synthetic construct; identical to SEQ ID NO: 307

SEQ ID NO: 3022 - protein, 120 aa, synthetic construct; identical to SEQ ID NO: 308

SEQ ID NO: 3023 - protein, 120 aa, synthetic construct; identical to SEQ ID NO: 309

SEQ ID NO: 3024 - protein, 120 aa, synthetic construct; identical to SEQ ID NO: 310

SEQ ID NO: 3025 - protein, 120 aa, synthetic construct; identical to SEQ ID NO: 311

SEQ ID NO: 3026 - protein, 120 aa, synthetic construct; identical to SEQ ID NO: 312

SEQ ID NO: 3027 - protein, 120 aa, synthetic construct; identical to SEQ ID NO: 313

SEQ ID NO: 3028 - protein, 120 aa, synthetic construct; identical to SEQ ID NO: 314

SEQ ID NO: 3029 - protein, 120 aa, synthetic construct; identical to SEQ ID NO: 315

SEQ ID NO: 3030 - protein, 120 aa, synthetic construct; identical to SEQ ID NO: 316

SEQ ID NO: 3031 - protein, 120 aa, synthetic construct; identical to SEQ ID NO: 317

SEQ ID NO: 3032 - protein, 120 aa, synthetic construct; identical to SEQ ID NO: 318

SEQ ID NO: 3033 - protein, 120 aa, synthetic construct; identical to SEQ ID NO: 319

SEQ ID NO: 3034 - protein, 120 aa, synthetic construct; identical to SEQ ID NO: 320

SEQ ID NO: 3035 - protein, 120 aa, synthetic construct; identical to SEQ ID NO: 321

SEQ ID NO: 3036 - protein, 120 aa, synthetic construct; identical to SEQ ID NO: 322

SEQ ID NO: 3037 - protein, 120 aa, synthetic construct; identical to SEQ ID NO: 323

SEQ ID NO: 3038 - protein, 120 aa, synthetic construct; identical to SEQ ID NO: 324

SEQ ID NO: 3039 - protein, 120 aa, synthetic construct; identical to SEQ ID NO: 325

SEQ ID NO: 3040 - protein, 120 aa, synthetic construct; identical to SEQ ID NO: 326

SEQ ID NO: 3041 - protein, 120 aa, synthetic construct; identical to SEQ ID NO: 327

SEQ ID NO: 3042 - protein, 120 aa, synthetic construct; identical to SEQ ID NO: 328

SEQ ID NO: 3043 - protein, 120 aa, synthetic construct; identical to SEQ ID NO: 329

SEQ ID NO: 3044 - protein, 120 aa, synthetic construct; identical to SEQ ID NO: 330

SEQ ID NO: 3045 - protein, 120 aa, synthetic construct; identical to SEQ ID NO: 331

SEQ ID NO: 3046 - protein, 120 aa, synthetic construct; identical to SEQ ID NO: 332

SEQ ID NO: 3047 - protein, 120 aa, synthetic construct; identical to SEQ ID NO: 333

SEQ ID NO: 3048 - protein, 120 aa, synthetic construct; identical to SEQ ID NO: 334

SEQ ID NO: 3049 - protein, 120 aa, synthetic construct; identical to SEQ ID NO: 335

SEQ ID NO: 3050 - protein, 120 aa, synthetic construct; identical to SEQ ID NO: 336

SEQ ID NO: 3051 - protein, 120 aa, synthetic construct; identical to SEQ ID NO: 337

SEQ ID NO: 3052 - protein, 120 aa, synthetic construct; identical to SEQ ID NO: 338

SEQ ID NO: 3053 - protein, 120 aa, synthetic construct; identical to SEQ ID NO: 339

SEQ ID NO: 3054 - protein, 120 aa, synthetic construct; identical to SEQ ID NO: 340

SEQ ID NO: 3055 - protein, 120 aa, synthetic construct; identical to SEQ ID NO: 341

SEQ ID NO: 3056 - protein, 120 aa, synthetic construct; identical to SEQ ID NO: 342

SEQ ID NO: 3057 - protein, 120 aa, synthetic construct; identical to SEQ ID NO: 343

SEQ ID NO: 3058 - protein, 120 aa, synthetic construct; identical to SEQ ID NO: 344

SEQ ID NO: 3059 - protein, 120 aa, synthetic construct; identical to SEQ ID NO: 345

SEQ ID NO: 3060 - protein, 120 aa, synthetic construct; identical to SEQ ID NO: 346

SEQ ID NO: 3061 - protein, 120 aa, synthetic construct; identical to SEQ ID NO: 347

SEQ ID NO: 3062 - protein, 120 aa, synthetic construct; identical to SEQ ID NO: 348

SEQ ID NO: 3063 - protein, 120 aa, synthetic construct; identical to SEQ ID NO: 349

SEQ ID NO: 3064 - protein, 120 aa, synthetic construct; identical to SEQ ID NO: 350

SEQ ID NO: 3065 - protein, 120 aa, synthetic construct; identical to SEQ ID NO: 351

SEQ ID NO: 3066 - protein, 120 aa, synthetic construct; identical to SEQ ID NO: 352

SEQ ID NO: 3067 - protein, 120 aa, synthetic construct; identical to SEQ ID NO: 353

SEQ ID NO: 3068 - protein, 120 aa, synthetic construct; identical to SEQ ID NO: 354

SEQ ID NO: 3069 - protein, 120 aa, synthetic construct; identical to SEQ ID NO: 355

SEQ ID NO: 3070 - protein, 120 aa, synthetic construct; identical to SEQ ID NO: 356

SEQ ID NO: 3071 - protein, 120 aa, synthetic construct; identical to SEQ ID NO: 357

SEQ ID NO: 3072 - protein, 120 aa, synthetic construct; identical to SEQ ID NO: 358

SEQ ID NO: 3073 - protein, 120 aa, synthetic construct; identical to SEQ ID NO: 359

SEQ ID NO: 3074 - protein, 120 aa, synthetic construct; identical to SEQ ID NO: 360

SEQ ID NO: 3075 - protein, 120 aa, synthetic construct; identical to SEQ ID NO: 361

SEQ ID NO: 3076 - protein, 120 aa, synthetic construct; identical to SEQ ID NO: 362

SEQ ID NO: 3077 - protein, 120 aa, synthetic construct; identical to SEQ ID NO: 363

SEQ ID NO: 3078 - protein, 120 aa, synthetic construct; identical to SEQ ID NO: 364

SEQ ID NO: 3079 - protein, 120 aa, synthetic construct; identical to SEQ ID NO: 365

SEQ ID NO: 3080 - protein, 120 aa, synthetic construct; identical to SEQ ID NO: 366

SEQ ID NO: 3081 - protein, 120 aa, synthetic construct; identical to SEQ ID NO: 367

SEQ ID NO: 3082 - protein, 120 aa, synthetic construct; identical to SEQ ID NO: 368

SEQ ID NO: 3083 - protein, 120 aa, synthetic construct; identical to SEQ ID NO: 369

SEQ ID NO: 3084 - protein, 120 aa, synthetic construct; identical to SEQ ID NO: 370

SEQ ID NO: 3085 - protein, 120 aa, synthetic construct; identical to SEQ ID NO: 371

SEQ ID NO: 3086 - protein, 120 aa, synthetic construct; identical to SEQ ID NO: 372

SEQ ID NO: 3087 - protein, 120 aa, synthetic construct; identical to SEQ ID NO: 373

SEQ ID NO: 3088 - protein, 120 aa, synthetic construct; identical to SEQ ID NO: 374

SEQ ID NO: 3089 - protein, 120 aa, synthetic construct; identical to SEQ ID NO: 375

SEQ ID NO: 3090 - protein, 120 aa, synthetic construct; identical to SEQ ID NO: 376

SEQ ID NO: 3091 - protein, 120 aa, synthetic construct; identical to SEQ ID NO: 377

SEQ ID NO: 3092 - protein, 120 aa, synthetic construct; identical to SEQ ID NO: 378

SEQ ID NO: 3093 - protein, 120 aa, synthetic construct; identical to SEQ ID NO: 379

SEQ ID NO: 3094 - protein, 120 aa, synthetic construct; identical to SEQ ID NO: 380

SEQ ID NO: 3095 - protein, 120 aa, synthetic construct; identical to SEQ ID NO: 381

SEQ ID NO: 3096 - protein, 120 aa, synthetic construct; identical to SEQ ID NO: 382

SEQ ID NO: 3097 - protein, 120 aa, synthetic construct; identical to SEQ ID NO: 383

SEQ ID NO: 3098 - protein, 120 aa, synthetic construct; identical to SEQ ID NO: 384

SEQ ID NO: 3099 - protein, 120 aa, synthetic construct; identical to SEQ ID NO: 385

SEQ ID NO: 3100 - protein, 120 aa, synthetic construct; identical to SEQ ID NO: 386

SEQ ID NO: 3101 - protein, 120 aa, synthetic construct; identical to SEQ ID NO: 387

SEQ ID NO: 3102 - protein, 120 aa, synthetic construct; identical to SEQ ID NO: 388

SEQ ID NO: 3103 - protein, 120 aa, synthetic construct; identical to SEQ ID NO: 389

SEQ ID NO: 3104 - protein, 120 aa, synthetic construct; identical to SEQ ID NO: 390

SEQ ID NO: 3105 - protein, 120 aa, synthetic construct; identical to SEQ ID NO: 391

SEQ ID NO: 3106 - protein, 123 aa, synthetic construct; identical to SEQ ID NO: 11

SEQ ID NO: 3107 - protein, 123 aa, synthetic construct; identical to SEQ ID NO: 392

SEQ ID NO: 3108 - protein, 123 aa, synthetic construct; identical to SEQ ID NO: 393

SEQ ID NO: 3109 - protein, 123 aa, synthetic construct; identical to SEQ ID NO: 394

SEQ ID NO: 3110 - protein, 123 aa, synthetic construct; identical to SEQ ID NO: 395

SEQ ID NO: 3111 - protein, 123 aa, synthetic construct; identical to SEQ ID NO: 396

SEQ ID NO: 3112 - protein, 123 aa, synthetic construct; identical to SEQ ID NO: 397

SEQ ID NO: 3113 - protein, 123 aa, synthetic construct; identical to SEQ ID NO: 398

SEQ ID NO: 3114 - protein, 123 aa, synthetic construct; identical to SEQ ID NO: 399

SEQ ID NO: 3115 - protein, 123 aa, synthetic construct; identical to SEQ ID NO: 400

SEQ ID NO: 3116 - protein, 125 aa, synthetic construct; identical to SEQ ID NO: 401

SEQ ID NO: 3117 - protein, 125 aa, synthetic construct; identical to SEQ ID NO: 402

SEQ ID NO: 3118 - protein, 125 aa, synthetic construct; identical to SEQ ID NO: 15

SEQ ID NO: 3119 - protein, 125 aa, synthetic construct; identical to SEQ ID NO: 403

SEQ ID NO: 3120 - protein, 125 aa, synthetic construct; identical to SEQ ID NO: 404

SEQ ID NO: 3121 - protein, 125 aa, synthetic construct; identical to SEQ ID NO: 405

SEQ ID NO: 3122 - protein, 125 aa, synthetic construct; identical to SEQ ID NO: 406

SEQ ID NO: 3123 - protein, 125 aa, synthetic construct; identical to SEQ ID NO: 407

SEQ ID NO: 3124 - protein, 125 aa, synthetic construct; identical to SEQ ID NO: 408

SEQ ID NO: 3125 - protein, 125 aa, synthetic construct; identical to SEQ ID NO: 409

SEQ ID NO: 3126 - protein, 125 aa, synthetic construct; identical to SEQ ID NO: 410

SEQ ID NO: 3127 - protein, 118 aa, synthetic construct; identical to SEQ ID NO: 411

SEQ ID NO: 3128 - protein, 118 aa, synthetic construct; identical to SEQ ID NO: 412

SEQ ID NO: 3129 - protein, 118 aa, synthetic construct; identical to SEQ ID NO: 413

SEQ ID NO: 3130 - protein, 118 aa, synthetic construct; identical to SEQ ID NO: 414

SEQ ID NO: 3131 - protein, 118 aa, synthetic construct; identical to SEQ ID NO: 415

SEQ ID NO: 3132 - protein, 118 aa, synthetic construct; identical to SEQ ID NO: 416

SEQ ID NO: 3133 - protein, 118 aa, synthetic construct; identical to SEQ ID NO: 417

SEQ ID NO: 3134 - protein, 118 aa, synthetic construct; identical to SEQ ID NO: 418

SEQ ID NO: 3135 - protein, 118 aa, synthetic construct; identical to SEQ ID NO: 419

SEQ ID NO: 3136 - protein, 118 aa, synthetic construct; identical to SEQ ID NO: 420

SEQ ID NO: 3137 - protein, 118 aa, synthetic construct; identical to SEQ ID NO: 421

SEQ ID NO: 3138 - protein, 118 aa, synthetic construct; identical to SEQ ID NO: 422

SEQ ID NO: 3139 - protein, 118 aa, synthetic construct; identical to SEQ ID NO: 423

SEQ ID NO: 3140 - protein, 118 aa, synthetic construct; identical to SEQ ID NO: 424

SEQ ID NO: 3141 - protein, 118 aa, synthetic construct; identical to SEQ ID NO: 425

SEQ ID NO: 3142 - protein, 118 aa, synthetic construct; identical to SEQ ID NO: 426

SEQ ID NO: 3143 - protein, 118 aa, synthetic construct; identical to SEQ ID NO: 427

SEQ ID NO: 3144 - protein, 118 aa, synthetic construct; identical to SEQ ID NO: 428

SEQ ID NO: 3145 - protein, 118 aa, synthetic construct; identical to SEQ ID NO: 429

SEQ ID NO: 3146 - protein, 118 aa, synthetic construct; identical to SEQ ID NO: 430

SEQ ID NO: 3147 - protein, 118 aa, synthetic construct; identical to SEQ ID NO: 431

SEQ ID NO: 3148 - protein, 118 aa, synthetic construct; identical to SEQ ID NO: 432

SEQ ID NO: 3149 - protein, 118 aa, synthetic construct; identical to SEQ ID NO: 433

SEQ ID NO: 3150 - protein, 118 aa, synthetic construct; identical to SEQ ID NO: 434

SEQ ID NO: 3151 - protein, 118 aa, synthetic construct; identical to SEQ ID NO: 435

SEQ ID NO: 3152 - protein, 118 aa, synthetic construct; identical to SEQ ID NO: 436

SEQ ID NO: 3153 - protein, 118 aa, synthetic construct; identical to SEQ ID NO: 437

SEQ ID NO: 3154 - protein, 118 aa, synthetic construct; identical to SEQ ID NO: 19

SEQ ID NO: 3155 - protein, 118 aa, synthetic construct; identical to SEQ ID NO: 438

SEQ ID NO: 3156 - protein, 118 aa, synthetic construct; identical to SEQ ID NO: 439

SEQ ID NO: 3157 - protein, 118 aa, synthetic construct; identical to SEQ ID NO: 440

SEQ ID NO: 3158 - protein, 118 aa, synthetic construct; identical to SEQ ID NO: 441

SEQ ID NO: 3159 - protein, 118 aa, synthetic construct; identical to SEQ ID NO: 442

SEQ ID NO: 3160 - protein, 118 aa, synthetic construct; identical to SEQ ID NO: 443

SEQ ID NO: 3161 - protein, 118 aa, synthetic construct; identical to SEQ ID NO: 444

SEQ ID NO: 3162 - protein, 118 aa, synthetic construct; identical to SEQ ID NO: 445

SEQ ID NO: 3163 - protein, 118 aa, synthetic construct; identical to SEQ ID NO: 446

SEQ ID NO: 3164 - protein, 118 aa, synthetic construct; identical to SEQ ID NO: 447

SEQ ID NO: 3165 - protein, 118 aa, synthetic construct; identical to SEQ ID NO: 448

SEQ ID NO: 3166 - protein, 118 aa, synthetic construct; identical to SEQ ID NO: 449

SEQ ID NO: 3167 - protein, 118 aa, synthetic construct; identical to SEQ ID NO: 450

SEQ ID NO: 3168 - protein, 118 aa, synthetic construct; identical to SEQ ID NO: 451

SEQ ID NO: 3169 - protein, 118 aa, synthetic construct; identical to SEQ ID NO: 452

SEQ ID NO: 3170 - protein, 118 aa, synthetic construct; identical to SEQ ID NO: 453

SEQ ID NO: 3171 - protein, 118 aa, synthetic construct; identical to SEQ ID NO: 454

SEQ ID NO: 3172 - protein, 118 aa, synthetic construct; identical to SEQ ID NO: 455

SEQ ID NO: 3173 - protein, 118 aa, synthetic construct; identical to SEQ ID NO: 456

SEQ ID NO: 3174 - protein, 118 aa, synthetic construct; identical to SEQ ID NO: 457

SEQ ID NO: 3175 - protein, 118 aa, synthetic construct; identical to SEQ ID NO: 458

SEQ ID NO: 3176 - protein, 118 aa, synthetic construct; identical to SEQ ID NO: 459

SEQ ID NO: 3177 - protein, 118 aa, synthetic construct; identical to SEQ ID NO: 460

SEQ ID NO: 3178 - protein, 118 aa, synthetic construct; identical to SEQ ID NO: 461

SEQ ID NO: 3179 - protein, 118 aa, synthetic construct; identical to SEQ ID NO: 462

SEQ ID NO: 3180 - protein, 118 aa, synthetic construct; identical to SEQ ID NO: 463

SEQ ID NO: 3181 - protein, 118 aa, synthetic construct; identical to SEQ ID NO: 464

SEQ ID NO: 3182 - protein, 118 aa, synthetic construct; identical to SEQ ID NO: 465

SEQ ID NO: 3183 - protein, 118 aa, synthetic construct; identical to SEQ ID NO: 466

SEQ ID NO: 3184 - protein, 118 aa, synthetic construct; identical to SEQ ID NO: 467

SEQ ID NO: 3185 - protein, 118 aa, synthetic construct; identical to SEQ ID NO: 468

SEQ ID NO: 3186 - protein, 118 aa, synthetic construct; identical to SEQ ID NO: 469

SEQ ID NO: 3187 - protein, 118 aa, synthetic construct; identical to SEQ ID NO: 470

SEQ ID NO: 3188 - protein, 118 aa, synthetic construct; identical to SEQ ID NO: 471

SEQ ID NO: 3189 - protein, 118 aa, synthetic construct; identical to SEQ ID NO: 472

SEQ ID NO: 3190 - protein, 118 aa, synthetic construct; identical to SEQ ID NO: 473

SEQ ID NO: 3191 - protein, 118 aa, synthetic construct; identical to SEQ ID NO: 474

SEQ ID NO: 3192 - protein, 118 aa, synthetic construct; identical to SEQ ID NO: 475

SEQ ID NO: 3193 - protein, 118 aa, synthetic construct; identical to SEQ ID NO: 476

SEQ ID NO: 3194 - protein, 118 aa, synthetic construct; identical to SEQ ID NO: 477

SEQ ID NO: 3195 - protein, 118 aa, synthetic construct; identical to SEQ ID NO: 478

SEQ ID NO: 3196 - protein, 118 aa, synthetic construct; identical to SEQ ID NO: 479

SEQ ID NO: 3197 - protein, 118 aa, synthetic construct; identical to SEQ ID NO: 480

SEQ ID NO: 3198 - protein, 118 aa, synthetic construct; identical to SEQ ID NO: 481

SEQ ID NO: 3199 - protein, 118 aa, synthetic construct; identical to SEQ ID NO: 482

SEQ ID NO: 3200 - protein, 118 aa, synthetic construct; identical to SEQ ID NO: 483

SEQ ID NO: 3201 - protein, 118 aa, synthetic construct; identical to SEQ ID NO: 484

SEQ ID NO: 3202 - protein, 118 aa, synthetic construct; identical to SEQ ID NO: 485

SEQ ID NO: 3203 - protein, 118 aa, synthetic construct; identical to SEQ ID NO: 486

SEQ ID NO: 3204 - protein, 118 aa, synthetic construct; identical to SEQ ID NO: 487

SEQ ID NO: 3205 - protein, 118 aa, synthetic construct; identical to SEQ ID NO: 488

SEQ ID NO: 3206 - protein, 129 aa, synthetic construct; identical to SEQ ID NO: 23

SEQ ID NO: 3207 - protein, 129 aa, synthetic construct; identical to SEQ ID NO: 489

SEQ ID NO: 3208 - protein, 129 aa, synthetic construct; identical to SEQ ID NO: 490

SEQ ID NO: 3209 - protein, 118 aa, synthetic construct; identical to SEQ ID NO: 31

SEQ ID NO: 3210 - protein, 118 aa, synthetic construct; identical to SEQ ID NO: 491

SEQ ID NO: 3211 - protein, 118 aa, synthetic construct; identical to SEQ ID NO: 492

SEQ ID NO: 3212 - protein, 118 aa, synthetic construct; identical to SEQ ID NO: 493

SEQ ID NO: 3213 - protein, 118 aa, synthetic construct; identical to SEQ ID NO: 494

SEQ ID NO: 3214 - protein, 118 aa, synthetic construct; identical to SEQ ID NO: 495

SEQ ID NO: 3215 - protein, 118 aa, synthetic construct; identical to SEQ ID NO: 496

SEQ ID NO: 3216 - protein, 118 aa, synthetic construct; identical to SEQ ID NO: 497

SEQ ID NO: 3217 - protein, 118 aa, synthetic construct; identical to SEQ ID NO: 498

SEQ ID NO: 3218 - protein, 118 aa, synthetic construct; identical to SEQ ID NO: 499

SEQ ID NO: 3219 - protein, 118 aa, synthetic construct; identical to SEQ ID NO: 500

SEQ ID NO: 3220 - protein, 118 aa, synthetic construct; identical to SEQ ID NO: 501

SEQ ID NO: 3221 - protein, 118 aa, synthetic construct; identical to SEQ ID NO: 502

SEQ ID NO: 3222 - protein, 118 aa, synthetic construct; identical to SEQ ID NO: 503

SEQ ID NO: 3223 - protein, 118 aa, synthetic construct; identical to SEQ ID NO: 504

SEQ ID NO: 3224 - protein, 118 aa, synthetic construct; identical to SEQ ID NO: 505

SEQ ID NO: 3225 - protein, 118 aa, synthetic construct; identical to SEQ ID NO: 506

SEQ ID NO: 3226 - protein, 118 aa, synthetic construct; identical to SEQ ID NO: 507

SEQ ID NO: 3227 - protein, 118 aa, synthetic construct; identical to SEQ ID NO: 508

SEQ ID NO: 3228 - protein, 118 aa, synthetic construct; identical to SEQ ID NO: 509

SEQ ID NO: 3229 - protein, 118 aa, synthetic construct; identical to SEQ ID NO: 510

SEQ ID NO: 3230 - protein, 118 aa, synthetic construct; identical to SEQ ID NO: 511

SEQ ID NO: 3231 - protein, 118 aa, synthetic construct; identical to SEQ ID NO: 512

SEQ ID NO: 3232 - protein, 118 aa, synthetic construct; identical to SEQ ID NO: 513

SEQ ID NO: 3233 - protein, 118 aa, synthetic construct; identical to SEQ ID NO: 514

SEQ ID NO: 3234 - protein, 119 aa, synthetic construct; identical to SEQ ID NO: 515

SEQ ID NO: 3235 - protein, 118 aa, synthetic construct; identical to SEQ ID NO: 516

SEQ ID NO: 3236 - protein, 118 aa, synthetic construct; identical to SEQ ID NO: 517

SEQ ID NO: 3237 - protein, 118 aa, synthetic construct; identical to SEQ ID NO: 518

SEQ ID NO: 3238 - protein, 118 aa, synthetic construct; identical to SEQ ID NO: 519

SEQ ID NO: 3239 - protein, 118 aa, synthetic construct; identical to SEQ ID NO: 520

SEQ ID NO: 3240 - protein, 118 aa, synthetic construct; identical to SEQ ID NO: 521

SEQ ID NO: 3241 - protein, 118 aa, synthetic construct; identical to SEQ ID NO: 27

SEQ ID NO: 3242 - protein, 118 aa, synthetic construct; identical to SEQ ID NO: 522

SEQ ID NO: 3243 - protein, 118 aa, synthetic construct; identical to SEQ ID NO: 523

SEQ ID NO: 3244 - protein, 118 aa, synthetic construct; identical to SEQ ID NO: 524

SEQ ID NO: 3245 - protein, 118 aa, synthetic construct; identical to SEQ ID NO: 525

SEQ ID NO: 3246 - protein, 118 aa, synthetic construct; identical to SEQ ID NO: 526

SEQ ID NO: 3247 - protein, 118 aa, synthetic construct; identical to SEQ ID NO: 527

SEQ ID NO: 3248 - protein, 118 aa, synthetic construct; identical to SEQ ID NO: 528

SEQ ID NO: 3249 - protein, 118 aa, synthetic construct; identical to SEQ ID NO: 529

SEQ ID NO: 3250 - protein, 118 aa, synthetic construct; identical to SEQ ID NO: 530

SEQ ID NO: 3251 - protein, 118 aa, synthetic construct; identical to SEQ ID NO: 531

SEQ ID NO: 3252 - protein, 118 aa, synthetic construct; identical to SEQ ID NO: 532

SEQ ID NO: 3253 - protein, 118 aa, synthetic construct; identical to SEQ ID NO: 533

SEQ ID NO: 3254 - protein, 118 aa, synthetic construct; identical to SEQ ID NO: 534

SEQ ID NO: 3255 - protein, 118 aa, synthetic construct; identical to SEQ ID NO: 535

SEQ ID NO: 3256 - protein, 118 aa, synthetic construct; identical to SEQ ID NO: 536

SEQ ID NO: 3257 - protein, 118 aa, synthetic construct; identical to SEQ ID NO: 537

SEQ ID NO: 3258 - protein, 118 aa, synthetic construct; identical to SEQ ID NO: 538

SEQ ID NO: 3259 - protein, 118 aa, synthetic construct; identical to SEQ ID NO: 539

SEQ ID NO: 3260 - protein, 118 aa, synthetic construct; identical to SEQ ID NO: 540

SEQ ID NO: 3261 - protein, 118 aa, synthetic construct; identical to SEQ ID NO: 541

SEQ ID NO: 3262 - protein, 118 aa, synthetic construct; identical to SEQ ID NO: 542

SEQ ID NO: 3263 - protein, 118 aa, synthetic construct; identical to SEQ ID NO: 543

SEQ ID NO: 3264 - protein, 118 aa, synthetic construct; identical to SEQ ID NO: 544

SEQ ID NO: 3265 - protein, 118 aa, synthetic construct; identical to SEQ ID NO: 545

SEQ ID NO: 3266 - protein, 118 aa, synthetic construct; identical to SEQ ID NO: 546

SEQ ID NO: 3267 - protein, 118 aa, synthetic construct; identical to SEQ ID NO: 547

SEQ ID NO: 3268 - protein, 118 aa, synthetic construct; identical to SEQ ID NO: 548

SEQ ID NO: 3269 - protein, 118 aa, synthetic construct; identical to SEQ ID NO: 549

SEQ ID NO: 3270 - protein, 118 aa, synthetic construct; identical to SEQ ID NO: 550

SEQ ID NO: 3271 - protein, 118 aa, synthetic construct; identical to SEQ ID NO: 551

SEQ ID NO: 3272 - protein, 118 aa, synthetic construct; identical to SEQ ID NO: 552

SEQ ID NO: 3273 - protein, 118 aa, synthetic construct; identical to SEQ ID NO: 553

SEQ ID NO: 3274 - protein, 118 aa, synthetic construct; identical to SEQ ID NO: 554

SEQ ID NO: 3275 - protein, 118 aa, synthetic construct; identical to SEQ ID NO: 555

SEQ ID NO: 3276 - protein, 118 aa, synthetic construct; identical to SEQ ID NO: 556

SEQ ID NO: 3277 - protein, 118 aa, synthetic construct; identical to SEQ ID NO: 557

SEQ ID NO: 3278 - protein, 118 aa, synthetic construct; identical to SEQ ID NO: 558

SEQ ID NO: 3279 - protein, 118 aa, synthetic construct; identical to SEQ ID NO: 559

SEQ ID NO: 3280 - protein, 118 aa, synthetic construct; identical to SEQ ID NO: 39

SEQ ID NO: 3281 - protein, 118 aa, synthetic construct; identical to SEQ ID NO: 560

SEQ ID NO: 3282 - protein, 118 aa, synthetic construct; identical to SEQ ID NO: 561

SEQ ID NO: 3283 - protein, 118 aa, synthetic construct; identical to SEQ ID NO: 562

SEQ ID NO: 3284 - protein, 118 aa, synthetic construct; identical to SEQ ID NO: 563

SEQ ID NO: 3285 - protein, 113 aa, synthetic construct; identical to SEQ ID NO: 43

SEQ ID NO: 3286 - protein, 116 aa, synthetic construct; identical to SEQ ID NO: 47

SEQ ID NO: 3287 - protein, 116 aa, synthetic construct; identical to SEQ ID NO: 564

SEQ ID NO: 3288 - protein, 116 aa, synthetic construct; identical to SEQ ID NO: 565

SEQ ID NO: 3289 - protein, 116 aa, synthetic construct; identical to SEQ ID NO: 566

SEQ ID NO: 3290 - protein, 116 aa, synthetic construct; identical to SEQ ID NO: 567

SEQ ID NO: 3291 - protein, 116 aa, synthetic construct; identical to SEQ ID NO: 568

SEQ ID NO: 3292 - protein, 116 aa, synthetic construct; identical to SEQ ID NO: 569

SEQ ID NO: 3293 - protein, 116 aa, synthetic construct; identical to SEQ ID NO: 570

SEQ ID NO: 3294 - protein, 116 aa, synthetic construct; identical to SEQ ID NO: 571

SEQ ID NO: 3295 - protein, 116 aa, synthetic construct; identical to SEQ ID NO: 572

SEQ ID NO: 3296 - protein, 116 aa, synthetic construct; identical to SEQ ID NO: 573

SEQ ID NO: 3297 - protein, 116 aa, synthetic construct; identical to SEQ ID NO: 574

SEQ ID NO: 3298 - protein, 116 aa, synthetic construct; identical to SEQ ID NO: 575

SEQ ID NO: 3299 - protein, 116 aa, synthetic construct; identical to SEQ ID NO: 576

SEQ ID NO: 3300 - protein, 116 aa, synthetic construct; identical to SEQ ID NO: 577

SEQ ID NO: 3301 - protein, 116 aa, synthetic construct; identical to SEQ ID NO: 578

SEQ ID NO: 3302 - protein, 116 aa, synthetic construct; identical to SEQ ID NO: 579

SEQ ID NO: 3303 - protein, 116 aa, synthetic construct; identical to SEQ ID NO: 580

SEQ ID NO: 3304 - protein, 116 aa, synthetic construct; identical to SEQ ID NO: 581

SEQ ID NO: 3305 - protein, 116 aa, synthetic construct; identical to SEQ ID NO: 582

SEQ ID NO: 3306 - protein, 116 aa, synthetic construct; identical to SEQ ID NO: 583

SEQ ID NO: 3307 - protein, 116 aa, synthetic construct; identical to SEQ ID NO: 584

SEQ ID NO: 3308 - protein, 116 aa, synthetic construct; identical to SEQ ID NO: 585

SEQ ID NO: 3309 - protein, 116 aa, synthetic construct; identical to SEQ ID NO: 586

SEQ ID NO: 3310 - protein, 116 aa, synthetic construct; identical to SEQ ID NO: 587

SEQ ID NO: 3311 - protein, 116 aa, synthetic construct; identical to SEQ ID NO: 588

SEQ ID NO: 3312 - protein, 116 aa, synthetic construct; identical to SEQ ID NO: 589

SEQ ID NO: 3313 - protein, 116 aa, synthetic construct; identical to SEQ ID NO: 590

SEQ ID NO: 3314 - protein, 116 aa, synthetic construct; identical to SEQ ID NO: 591

SEQ ID NO: 3315 - protein, 116 aa, synthetic construct; identical to SEQ ID NO: 592

SEQ ID NO: 3316 - protein, 116 aa, synthetic construct; identical to SEQ ID NO: 593

SEQ ID NO: 3317 - protein, 116 aa, synthetic construct; identical to SEQ ID NO: 594

SEQ ID NO: 3318 - protein, 116 aa, synthetic construct; identical to SEQ ID NO: 595

SEQ ID NO: 3319 - protein, 116 aa, synthetic construct; identical to SEQ ID NO: 596

SEQ ID NO: 3320 - protein, 116 aa, synthetic construct; identical to SEQ ID NO: 597

SEQ ID NO: 3321 - protein, 116 aa, synthetic construct; identical to SEQ ID NO: 598

SEQ ID NO: 3322 - protein, 116 aa, synthetic construct; identical to SEQ ID NO: 599

SEQ ID NO: 3323 - protein, 116 aa, synthetic construct; identical to SEQ ID NO: 600

SEQ ID NO: 3324 - protein, 116 aa, synthetic construct; identical to SEQ ID NO: 601

SEQ ID NO: 3325 - protein, 116 aa, synthetic construct; identical to SEQ ID NO: 602

SEQ ID NO: 3326 - protein, 116 aa, synthetic construct; identical to SEQ ID NO: 603

SEQ ID NO: 3327 - protein, 116 aa, synthetic construct; identical to SEQ ID NO: 604

SEQ ID NO: 3328 - protein, 116 aa, synthetic construct; identical to SEQ ID NO: 605

SEQ ID NO: 3329 - protein, 116 aa, synthetic construct; identical to SEQ ID NO: 606

SEQ ID NO: 3330 - protein, 116 aa, synthetic construct; identical to SEQ ID NO: 607

SEQ ID NO: 3331 - protein, 116 aa, synthetic construct; identical to SEQ ID NO: 608

SEQ ID NO: 3332 - protein, 116 aa, synthetic construct; identical to SEQ ID NO: 609

SEQ ID NO: 3333 - protein, 116 aa, synthetic construct; identical to SEQ ID NO: 610

SEQ ID NO: 3334 - protein, 116 aa, synthetic construct; identical to SEQ ID NO: 611

SEQ ID NO: 3335 - protein, 116 aa, synthetic construct; identical to SEQ ID NO: 612

SEQ ID NO: 3336 - protein, 116 aa, synthetic construct; identical to SEQ ID NO: 613

SEQ ID NO: 3337 - protein, 116 aa, synthetic construct; identical to SEQ ID NO: 614

SEQ ID NO: 3338 - protein, 116 aa, synthetic construct; identical to SEQ ID NO: 615

SEQ ID NO: 3339 - protein, 116 aa, synthetic construct; identical to SEQ ID NO: 616

SEQ ID NO: 3340 - protein, 116 aa, synthetic construct; identical to SEQ ID NO: 617

SEQ ID NO: 3341 - protein, 116 aa, synthetic construct; identical to SEQ ID NO: 618

SEQ ID NO: 3342 - protein, 116 aa, synthetic construct; identical to SEQ ID NO: 619

SEQ ID NO: 3343 - protein, 116 aa, synthetic construct; identical to SEQ ID NO: 620

SEQ ID NO: 3344 - protein, 116 aa, synthetic construct; identical to SEQ ID NO: 621

SEQ ID NO: 3345 - protein, 116 aa, synthetic construct; identical to SEQ ID NO: 622

SEQ ID NO: 3346 - protein, 116 aa, synthetic construct; identical to SEQ ID NO: 623

SEQ ID NO: 3347 - protein, 116 aa, synthetic construct; identical to SEQ ID NO: 624

SEQ ID NO: 3348 - protein, 116 aa, synthetic construct; identical to SEQ ID NO: 625

SEQ ID NO: 3349 - protein, 116 aa, synthetic construct; identical to SEQ ID NO: 626

SEQ ID NO: 3350 - protein, 116 aa, synthetic construct; identical to SEQ ID NO: 627

SEQ ID NO: 3351 - protein, 116 aa, synthetic construct; identical to SEQ ID NO: 628

SEQ ID NO: 3352 - protein, 116 aa, synthetic construct; identical to SEQ ID NO: 629

SEQ ID NO: 3353 - protein, 116 aa, synthetic construct; identical to SEQ ID NO: 630

SEQ ID NO: 3354 - protein, 116 aa, synthetic construct; identical to SEQ ID NO: 631

SEQ ID NO: 3355 - protein, 116 aa, synthetic construct; identical to SEQ ID NO: 632

SEQ ID NO: 3356 - protein, 116 aa, synthetic construct; identical to SEQ ID NO: 633

SEQ ID NO: 3357 - protein, 116 aa, synthetic construct; identical to SEQ ID NO: 634

SEQ ID NO: 3358 - protein, 116 aa, synthetic construct; identical to SEQ ID NO: 635

SEQ ID NO: 3359 - protein, 116 aa, synthetic construct; identical to SEQ ID NO: 636

SEQ ID NO: 3360 - protein, 116 aa, synthetic construct; identical to SEQ ID NO: 637

SEQ ID NO: 3361 - protein, 116 aa, synthetic construct; identical to SEQ ID NO: 638

SEQ ID NO: 3362 - protein, 116 aa, synthetic construct; identical to SEQ ID NO: 639

SEQ ID NO: 3363 - protein, 116 aa, synthetic construct; identical to SEQ ID NO: 640

SEQ ID NO: 3364 - DNA, 360 bp, synthetic construct
  source 1..360: mol_type = other DNA
gaggtgcagctggtggagtctgggggagacttggtgcaggctggggggtctctgagagtctcctgtgcagcctctggaagcatcttcaggaccgatgccatgggctggcaccgccaggttccagggaagcagcgcgagtttgtcgcgggtattcgtagtgatggatacacaaactatgcggactccgtgaagggccgattcaccatctccagggataccgtcaagaacacggtgtatctgcagatgaacagcctgaaacctgaggacacagccgtctatagctgttattatcaatccctcagtagtcctaattacggccaagtcttctggggccaggggacccaggtcaccgtctcctca

SEQ ID NO: 3365 - DNA, 360 bp, synthetic construct
  source 1..360: mol_type = other DNA
gaggtgcagctggtggagtctgggggagacttggtgcaggctggggggtctctgagactctcctgtgcagcctctggaagcatcgtcagtaccaaagccatgggatggcaccgccaggttccagggaagcgacgcgagttggtcgcaggtattcgtagtgatggatttacaaactatgcggactccgtgaagggccgattcaccatctccagcgatagcgtcaacgacacggtgtatctgcagatgaacagcctgaaagctgaagacacagccgtctatttttgtttttatcaatccctcagtactcctagttacggccaaaccttctggggccaggggacccaggtcaccgtctcctca

SEQ ID NO: 3366 - DNA, 360 bp, synthetic construct
  source 1..360: mol_type = other DNA
gaggtgcagctggtggagtctgggggaggcttggtgcaggctggggggtctcttggagtctcctgtgcagcctctggaagcatcttcaggaccgatgccatgggctggcaccgccaggttccagggaagcagcgcgagtttgtcgcgggtattcgtagtgatggatttacaaactatgcggactccgtgaagggccgattcaccatctccagggataccgtcaagaacacggtgtatctgcagatgaacagcctgaaacctgaggacacagccgtctatagctgttattatcaatccctcagtagtcctaattacggccaagtcttctggggccaggggacccaggtcaccgtctcctca

SEQ ID NO: 3367 - DNA, 360 bp, synthetic construct; identical to SEQ ID NO: 48
  source 1..360: mol_type = other DNA

SEQ ID NO: 3368 - DNA, 360 bp, synthetic construct
  source 1..360: mol_type = other DNA
gaggtgcagctggtggagtctgggggagacttggtgcaggctggggggtctctgagactctcctgtgcagcctctggaagcatcgtcagtacgaatggcatgggatggcaccgccaggttccagggaagggccgcgagttggtcgcaggtattcgtagtgatggatttacaaactatgcggactccgtgaagggccgattcaccatctccagcgataacgtcaagaacacggtgtatctgcagatgaacagcctgaaagctgaggactcaggcgtctatttttgttattatcaagcccttagttctcctaattacggccaaaccttctggggccaggggacccaggtcaccgtctcctca

SEQ ID NO: 3369 - DNA, 360 bp, synthetic construct; identical to SEQ ID NO: 49
  source 1..360: mol_type = other DNA

SEQ ID NO: 3370 - DNA, 360 bp, synthetic construct
  source 1..360: mol_type = other DNA
gaggtgcagctggtggagtctgggggaggctcggtgcaggctggggggtctctgagactctcctgtgcagcctctggaagcatcgtcagtacgaatggcatgggatggcaccgccaggttccagggaagggacgcgagttggtcgcaggtattcgtagtgatggatttacaaactatgcggactccgtgaagggccgattcaccatctccagcgataacgtcaagaacacggtgtatctgcagatgaacagcctgaaagctgaggactcaggcgtctatttttgttattatcaagccctcagttctcctaattacggccaaaccttctggggccaggggacccaggtcaccgtctcctca

SEQ ID NO: 3371 - DNA, 360 bp, synthetic construct
  source 1..360: mol_type = other DNA
gaggtgcagctggtggagtctgggggagacttggtgcaggctggggggtctctgagactctcctgtgcagcctctggaagcatcgtcagtacgaatggcatgggatggcaccgccaggttccagggaagggacgcgagttggtcgcaggtattcgtagtgatggatttacaaactatgcggactccgtgaagggccgattcaccatctccagcgataacgtcaagaacacggtgtatctgcagatgaacagcctgaaagctgaggactcaggcgtctatttttgttattatcaatccctcagtactcctaattacggccaaaccttctggggccaggggacccaggtcaccgtctcctca

SEQ ID NO: 3372 - DNA, 360 bp, synthetic construct
  source 1..360: mol_type = other DNA
gaggtgcagctggtggagtctgggggagacttggtgcaggctggggggtctctgagactctcctgtgcagcctctggaagcatcgtcagtaccaatagcatgggctggcaccgccaggttccagggaaacaacgcgagttggtcgcaggtattcgtagtgatggattcataaactatgcagacgccgtgaagggccgattcaccatctccagcgataacgtcaacaacacggtgtatctgcagatgaacagcctgaaacctgaggacacagccgtctatttgtgtttttatcaatccctcagtactcctaattttggccaagtcttctggggccaggggacccaggtcaccgtctcctca

SEQ ID NO: 3373 - DNA, 360 bp, synthetic construct
  source 1..360: mol_type = other DNA
gaggtgcagctggtggagtctgggggaggctcggtgcaggctggggggtctctgaggctctcctgtgcagcctctggaagcatcttcagtctcaatggcatgggctggtaccgccaggctccagggaagcagcgcgagttggtcgcaggaattcgtagtgatggactggtaaattatggggactccgtgaagggccgattcaccatctccggagataacgccaagagcactgtgtatctgcagatgaacggcctgaaacctgaggacacagccgactatgattgttattatcaatccctcagtactcctaattacggccaaaccttctggggccaggggacccaggtcaccgtctcctca

SEQ ID NO: 3374 - DNA, 360 bp, synthetic construct
  source 1..360: mol_type = other DNA
gaggtgcagctggtggagtctgggggagacttggtgcaggctggggggtctctgagactctcctgtgcagcctctggaaacatcgtcagttccaatagcatgggctggcaccgccaggttccagggaagcgacgcgagttggtcgcgggtattcgtagtgatggattcataaactatgcggactccgtgaagggccgattcaccatctccagcgataacgtcaacaacacggtgtatctgcagatgaacagcctgaaacctgaggacacagccgtctatttgtgtttttatcaatccctcagtcatcctaattacggccatgtcttctggggccaggggacccaggtcaccgtctcctca

SEQ ID NO: 3375 - DNA, 360 bp, synthetic construct
  source 1..360: mol_type = other DNA
gaggtgcagctggtggagtctgggggagacttggtgcaggctggggggtctctgagactctcctgtgcagcctctggaagcatcgtcagtaccaaagccatgggatggcaccgccaggttccagggaagcgacgcgagttggtcgcaggtattcgtagtgatggatttacaaactatgcggactccgtgaagggccgattcaccatctccagcgatagcgtcaacgacacggtgtatctgcagatgaatagcctgaaagctgaagacacagccgtctatttttgtttttatcaacccctcagtactcctaattacggccaaaccttctggggccaggggacccaggtcaccgtctcctca

SEQ ID NO: 3376 - DNA, 360 bp, synthetic construct
  source 1..360: mol_type = other DNA
gaggtgcagctggtggagtctgggggagacttggtgcaggctggggggtctctgagactctcctgtgcagcctctggaagcatcgtcagtaccaaagccatgggatggcaccgccaggttccagggaagcgacgcgagttggtcgcaggtattcgtagtgatggatttacaaactatgcggactccgtgaagggccgattcaccatctccagcgatagcgtcaacgacacggtgtatctgcagatgaacagcctgaaagctgaagacacagccgtctatttttgtttttatcaatccctcagtactcctaattacggccgaaccttctggggccaggggacccaggtcaccgtctcctca

SEQ ID NO: 3377 - DNA, 360 bp, synthetic construct
  source 1..360: mol_type = other DNA
gaggtgcagctggtggagtctgggggagacttggtgcaggctggggggtctctgagactctcctgtgcagcctctggaagcatcgtcagtaccaatagcatgggctggcaccgccaggttccagggaagcgacgcgagttggtcgcaggtattcgtagtgatggattcataaactatgcggactccgtgaagggccgattcaccatctccagcgataacgtcaacaacacggtgtatctgcagatgaacagcctgaaacctgaggacacagccgtctatttgtgtttttatcactccctcagtactcctaattacggccaagtcttctggggccaggggacccaggtcaccgtctcctca

SEQ ID NO: 3378 - DNA, 360 bp, synthetic construct
  source 1..360: mol_type = other DNA
gaggtgcagctggtggagtctgggggagacttggtgcaggctggggggtctctgagactctcctgtgcagcctctggaagcatcgtcagtacccgtgccatgggatggcaccgccaggttccagggaagcgacgcgagttggtcgcaggtcttcgtagtgatggatttacaaactatgcggactccgtgaagggccgattcaccatctccagcgataacgtcaagaacacggtgcatctgcagatgaacagcctgaaagctgaggacacagccgtctatttttgtttttatcaatccctcagtactcctaattccggccaaaccttctggggccaggggacccaggtcaccgtctcctca

SEQ ID NO: 3379 - DNA, 360 bp, synthetic construct
  source 1..360: mol_type = other DNA
gaggtgcagctggtggagtctgggggagacttggtgcaggctggggggtctctgagactctcctgtgcagcctctggaagcatcgtcagtacccgtgccatgggatggcaccgccaggttccagggaagcgacgcgagttggtcgcaggtcttcgtagtgatggatttacaaactatgcggactccgtgaagggccgattcaccatctccagcgataacgtcaagaacacggtgcatctgcagatgaacagcctgaaagctgaggacacagccgtctatttttgtttttatcaatccctcagtactcctaagtacggccaaaccttctggggccaggggacccaggtcaccgtctcctca

SEQ ID NO: 3380 - DNA, 360 bp, synthetic construct
  source 1..360: mol_type = other DNA
gaggtgcagctggtggagtctgggggaggctcggtgcaggctggggggtctctgaggctctcctgtgcagcctctggaagcatcttcagtctcaatggcatgggctggtaccgccaggctccagggaagcagcgcgagttggtcgcaggaattcgtagtgatggactggtaaattatggggactccgtgaagggccgattcaccatctccggagataacgccaagagcactgtgtatctgcagatgaacggcctgaaacctgaggacacagccgactatgattgttattatcaatccttcagttctcctaattacggccaaaccttctggggccaggggacccaggtcaccgtctcctca

SEQ ID NO: 3381 - DNA, 360 bp, synthetic construct
  source 1..360: mol_type = other DNA
gaggtgcagctggtggagtctgggggagacttggtgcaggctggggggtctctgagactctcctgtgcagcctctggaagcatcgtcagttcccgtagcatgggctggcaccgccaggttccagggaagcgacgcgaattggtcgcaggtattcgtagtgatggattcataaactatgcggactccgtgaagggccgattcaccatctccagcgataacgtcaacaacacggtgtatctgcagatgaacagcctgaaacctgaggacacagccgtctatttgtgtttttatcactccctcagtactcctaattacggccaagtcttctggggccaggggacccaggtcaccgtctcctca

SEQ ID NO: 3382 - DNA, 360 bp, synthetic construct
  source 1..360: mol_type = other DNA
gaggtgcagctggtggagtctgggggagacttggtgcaggctggggggtctctgagactctcctgtgcagcctctggaagcatcgtcagtaccaaagccatgggatggcaccgccaggttccagggaagcgacgcgagttggtcgcaggtattcgtagtgatggatttacaaactatgcggactccgtgaagggccgattcaccatctccagcgatagcgtcaacgacacggtgtatctgcagatgaacagcctgaaagctgaagacacagccgtctatttttgtttttatcaatccctcggtactcctaattacggccaaaccttctggggccaggggacccaggtcaccgtctcctca

SEQ ID NO: 3383 - DNA, 360 bp, synthetic construct
  source 1..360: mol_type = other DNA
gaggtgcagctggtggagtctgggggagacttggtgcaggctggggggtctctgagactctcctgtgcagcctctggaagcatcgtcagtaccaaagccatgggatggcaccgccaggttccagggaagcgacgcgagttggtcgcaggtattcgtagtgatggatttacaaactatgcggactccgtgaagggccgattcaccatctccagcgatagcgtcaacgacacggtgtatctgcagatgaacagcctgaaagctgaagacacagccgtctatttttgttttgatcaatccctcagtactcctaattacggccaaaccttctggggccaggggacccaggtcaccgtctcctca

SEQ ID NO: 3384 - DNA, 360 bp, synthetic construct
  source 1..360: mol_type = other DNA
gaggtgcagctggtggagtctgggggagacttggtgcaggctggggggtctctgagactctcctgtgcagcctctggaagcatcgtcagtaccaaagccatgggatggcaccgccaggttccagggaagcgacgcgagttggtcgcaggtattcgtagtgatggatttacaaactatgcggactccgtgaagggccgattcaccatctccagcgatagcgtcaacgacacggtgtatctgcagatgaacagcctgaaagctgaagacacagccgtctatttttgtttttatcaatccctcagtactcctaagtacggccaaaccttctggggccaggggacccaggtcaccgtctcctca

SEQ ID NO: 3385 - DNA, 360 bp, synthetic construct
  source 1..360: mol_type = other DNA
gaggtgcagctggtggagtctgggggagacttggtgcaggctggggggtctctgagactctcctgtgcagcctctggaagcatcgtcagtaccaatgccatgggatggcaccgccaggttccagggaagggacgcgagttggtcgcaggctttcgtagtgatggatttacaaactatgcggactccgtgaagggccgattcaccatctccagcgataacgtcaagaacacggtgtatctgcagatgaacagcctgaaagctgaggacacagccgtctatttttgtttttatcaatccctcagtactcctaatgtcggtcaaacgttctggggccaggggacccaggtcaccgtctcctca

SEQ ID NO: 3386 - DNA, 360 bp, synthetic construct
  source 1..360: mol_type = other DNA
gaggtgcagctggtggagtctgggggagacttggtgcaggctggggggtctctgagactctcctgtgcagcctctggaagcatcgtcagtaccaatgccatgggatggcaccgccaggttccagggaagggacgcgagttggtcgcaggctttcgtagtgatggatttacaaactatgcggactccgtgaagggccgattcaccatctccagcgataacgtcaagaacacggtgtatctgcagatgaacagcctgaaagctgaggacacagccgtctatttttgtttttatcaatccctcagtacacctactttcggtcaaacgttctggggccaggggacccaggtcaccgtctcctca

SEQ ID NO: 3387 - DNA, 360 bp, synthetic construct
  source 1..360: mol_type = other DNA
gaggtgcagctggtggagtctgggggagacttggtgcaggctggggggtctctgaggctctcctgtgcagcctctggaagcatcgtcagtaccaatagcatgggctggcaccgccaggttccagggaaccgacgcgaaatggtcgcaggtattcgtagtgatggattcataaactatgcggactccgtgaagggccgattcaccatctccagcgataacgtcaacaacacggtgtatctgcagatgaacagcctgaaacctgaggacacagccgtctatttgtgtttttatcaatccctcagtactcctaattttggccaagtcttctggggccaggggacccaggtcaccgtctcctca

SEQ ID NO: 3388 - DNA, 360 bp, synthetic construct
  source 1..360: mol_type = other DNA
gaggtgcagctggtggagtctgggggagacttggtgcaggctggggggtctctgagactctcctgtgcagcctctggaagcatcgtcagtaccaatagcatgggctggcaccgccaggttccagggaagcgacgcgagttggtcgcaggtattcgtagtgatggattcataaactatgcggactccgtgaagggccgattcaccatctccagcgataacgtcaacaacacggtgtatctgcagatgaacagcctgaaacctgaggacacagccgtctatttgtgtttttatcaatccctcagtactcctaattacggccaactcttctggggccaggggacccaggtcaccgtctcctca

SEQ ID NO: 3389 - DNA, 360 bp, synthetic construct
  source 1..360: mol_type = other DNA
gaggtgcagctggtggagtctgggggagacttggtgcaggctggggggtctctgagactctcctgtgcagcctctggaagcatcgtcagtaccaatagcatgggctggcaccgccaggttccagggaagcgacgcgagttggtcgcaggtattcgcagtgatggattcataaactatgcggactccgtgaagggccgattcaccatctccagcgataacgtcaacaacacggtgtatctgcagatgaacagcctgaaacctgaggacacagccgtctatttgtgtttttatcaatccctcagtactcctaattacggccaagtcttctggggccaggggacccaggtcaccgtctcctca

SEQ ID NO: 3390 - DNA, 360 bp, synthetic construct
  source 1..360: mol_type = other DNA
gaggtgcagctggtggagtctgggggagacttggtgcaggctggggggtctctgagactcgcctgtgcagcctctggaagcatcgtcagtaccaatagcatgggctggcaccgccaggttccagggaagcgacgcgagttggtcgcaggtattcgtagtgatggattcataaactatgcggactccgtgaagggccgattcaccatcttcagcgataacgtcaacaacacggtgtatctgcagatgaacagcctgaaacctgaggacacagccgtctatttgtgtttttatcaatccctcagtactcataattacggccaagtcttctggggccgggggacccaggtcaccgtctcctca

SEQ ID NO: 3391 - DNA, 360 bp, synthetic construct
  source 1..360: mol_type = other DNA
gaggtgcagctggtggagtctgggggagacttggtgcaggctggggggtctctgagactctcctgtgcagcctctggaagcatcgtcagtaccaatagcatgggctggcaccgccaggttccagggaagcgacgcgagttggtcgcaggtattcgtagtgatggattcataaactatgcggactccgtgaagggccgattcaccatctccagcgataacgtcaataacacggtgtatctgcagatgaacagcctgaaacctgaggactcagccgtctatttgtgtttttatcaatccctcagtacttctaattacggccaggtcttccggggccaggggacccaggtcaccgtctcctca

SEQ ID NO: 3392 - DNA, 360 bp, synthetic construct
  source 1..360: mol_type = other DNA
gaggtgcagctggtggagtctgggggagacttggtgcaggctggggggtctctgagactctcctgtgcagcctctggaagcatcgtcagtaccaatagcatgggctggcaccgccaggttccagggaagcgacgcgagttggtcgcaggtattcgtagtgatggattcataaactatgcggactccgtgaagggccgattcaccatctccagcgataacgtcaacaacacggtgtatctgcagatgaacagcctgaaacctgaggacacagccgtctatttgtgtttttatcaatccctcagtactcctacttacggccaagtcttctggggccaggggacccaggtcaccgtctcctca

SEQ ID NO: 3393 - DNA, 360 bp, synthetic construct
  source 1..360: mol_type = other DNA
gaggtgcagctggtggagtctgggggagacttggtgcaggctggggggtctctgagactctcctgtgcagcctctggaagcatcgtcagtacaaatagcatgggctggcaccgccaggttccagggaagcgacgcgagttggtcgcaggtattcgtagtgatggattcataaactatgcggactccgtgaagggccgattcaccatctccagcgataacgtcaacaacacggtgtatctgcagatgaacagcctgaaacctgaggacacagccgtctatttgtgtttttatcaatccctcagtactcctaagtacggccaagtcttctggggccaggggacccaggtcaccgtctcctca

SEQ ID NO: 3394 - DNA, 360 bp, synthetic construct
  source 1..360: mol_type = other DNA
gaggtgcagctggtggagtctgggggagacttggtgcaggctggggggtctctgagactctcctgtgcagcctctggaagcatcgtcagtaccaatagcatgggctggcaccgccaggttccagggaagcgacgcgagttggtcgcaggtattcgtagtgatggattcataaactatgcggactccgtgaagggccgattcaccatctccagcgataacgtcaataacacggtgtatctgcagatgaacagcctgaaacctgaggacacagccgtctatttgtgtttttatcaatccctcagtactcctaattacggccatgtcttctggggccaggggacccaggtcaccgtctcctca

SEQ ID NO: 3395 - DNA, 360 bp, synthetic construct
  source 1..360: mol_type = other DNA
gaggtgcagctggtggagtctgggggagacttggtgcaggctggggggtctctgagactctcctgtgcagcctctggaagcatcgtcagtaccaatagcatgggctggcaccgccaggttccagggaagcgacgcgagttggtcgcaggtattcgtagtgatggattcataaactatgcggactccgtgaagggccgattcaccatctccagcgataacgtcaacaacacggtgtatctgcagatgaacagcctgaaacctgaggacacagccgtctatttgtgtttttatcaatccctcggtactcctaattacggccaagtcttctggggccaggggacccaggtcaccgtctcctca

SEQ ID NO: 3396 - DNA, 360 bp, synthetic construct
  source 1..360: mol_type = other DNA
gaggtgcagctggtggagtctgggggagacttggtgcaggctggggggtctctgagactctcctgtgcagcctctggaagcatcgtcagtaccaatagcatgggctggcaccgccaggttccagggaagcgacgcgagttggtcgcaggtattcgtagtgatggattcataaactatgcggactccgtgaagggccgattcaccatctccagcgataacgtcaacaacacggtgtatctgcagatgaacagcctgaaacctgaggacacagccgtctatttgtgtttttctcaatccctcagtactcctaattacggccaagtcttctggggccaggggacccaggtcaccgtctcctca

SEQ ID NO: 3397 - DNA, 360 bp, synthetic construct
  source 1..360: mol_type = other DNA
gaggtgcagctggtggagtctgggggagacttggtgcaggctggggggtctctgagactctcctgtgcagcctctggaagcatcgtcagtaccaatagtatgggctggcaccgccaggttccagggaagcgacgcgagttggtcgcaggtattcgtagtgatggattcataaactatgcggactccgtgaagggccgattcaccatctccagcgataacgtcaacaacacggtgtatctgcagatgaacagcctgaaacctgaggacacagccgtctatttgtgttttgatcaatccctcagtactcctaattacggccaagtcttctggggccaggggacccaggtcaccgtctcctca

SEQ ID NO: 3398 - DNA, 360 bp, synthetic construct
  source 1..360: mol_type = other DNA
gaggtgcagctggtggagtctgggggagacttggtgcaggctggggggtctctgagactctcctgtgcagcctctggaagcatcgtcagtaccaatagcatgggctggcaccgccaggttccagggaagcgacgcgagttggtcgcaggtattcgtagtgatggattcataaactatgcggactccgtgaagggccgattcaccatctccagcgataacgtcaacaacacggtgtatctgcagatgaacagcctgaaacctgaggacacagccgtctatttgtgtttttatcaatcccacagtactcctaattacggccaagtcttctggggccaggggacccaggtcaccgtctcctca

SEQ ID NO: 3399 - DNA, 360 bp, synthetic construct
  source 1..360: mol_type = other DNA
gaggtgcagctggtggagtctgggggagacttggtgcaggctggggggtctctgagactctcctgtgcagcctctggaagcatcgtcagtaccaatagcatgggctggcaccgccaggttccagggaagcgacgcgagttggtcgcaggtattcgtagtgatggattcataaactatgcggactccgtgaagggccgattcaccatctccagcgataacttcaacaacacggtgtatctgcagatgaacagcctgaaacctgaggacacagccgtctatttgtgtttttatcaatccctcagtactcctaattacggccgggtcttctggggccaggggacccaggtcaccgtctcctca

SEQ ID NO: 3400 - DNA, 360 bp, synthetic construct
  source 1..360: mol_type = other DNA
gaggtgcagctggtggagtctgggggagacttggtgcaggctggggggtctctgagactctcctgtgcagcctctggaagcatcgtcagtacccgtgccatgggatggcaccgccaggttccagggaagcgacgcgagttggtcgcaggtcttcgtagtgatggatttacaaactatgcggactccgtgaagggccgattcaccatctccagcgataacgtcaagaacacggtgcatctgcagatgaacagcctgaaagctgaggacacagccgtctatttttgtttttatcaatcccacagtactcctaattacggccaaaccttctggggccaggggacccaggtcaccgtctcctca

SEQ ID NO: 3401 - DNA, 360 bp, synthetic construct
  source 1..360: mol_type = other DNA
gaggtgcagctggtggagtctgggggagacttggtgcaggctggggggtctctgagactctcctgtgcagcctctggaagcatcgtcagtacccgtgccatgggatggcaccgccaggttccagggaagcgacgcgagttggtcgcaggtcttcgtagtgatggatttacaaactatgcggactccgtgaagggccgattcaccatctccagcgataacgtcaagaacacggtgcatctgcagatgaacagcctgaaagctgaggacacagccgtctatttttgttttgatcaatccctcagtactcctaattacggccaaaccttctggggccaggggacccaggtcaccgtctcctca

SEQ ID NO: 3402 - DNA, 360 bp, synthetic construct
  source 1..360: mol_type = other DNA
gaggtgcagctggtggagtctgggggagactcggtgcaggctggggggtctctgagactctcctgtgcagcctctggaaacatcgtcagttccaatagcatgggctggcaccgccaggttccagggaagcgacgcgagttggtcgcgggtattcgtagtgatggattcataaactatgcggactccgtgaagggccgattcaccatctccagcgataacgtcaacaacacggtgtatctgcagatgaacagcctgaaacctgaggacacagccgtctatttgtgtttttatcaatccctcagtcatcctaattacggccatgtcttctggggccaggggacccaggtcaccgtctcctca

SEQ ID NO: 3403 - DNA, 360 bp, synthetic construct
  source 1..360: mol_type = other DNA
gaggtgcagctggtggagtctgggggagacttggtgcaggctggggggtctctgagactctcctgtgcagcctctggaagcatcgtcagttcccgtagcatgggctggcaccgccaggttccagggaagcgacgcgaattggtcgcaggtattcgtagtgatggattcataaactatgcggactccgtgaagggccgattcaccatctccagcgataacgtcaacaacacggtgtatctgcagatgaacagcctgaaacctgaggacacagccgtctatttgtgttttcatcaatccctcagtactcctaattacggccaagtcttctggggccaggggacccaggtcaccgtctcctca

SEQ ID NO: 3404 - DNA, 360 bp, synthetic construct
  source 1..360: mol_type = other DNA
gaggtgcagctggtggagtctgggggaggcttggtgcaggctggggggtctctgagagtctcctgtgcagcctctggaagcatcttcagggccgatgccatgggctggcaccgccaggttccagggaagccgcgcgagtttgtcgcgggtattcgtagtgatggatttaccaactatgcggaggccgtgaagggccgattcaccatctcctgggataccgtcaagaacacggtgtatctgcagatgaacagcctgaaacctgaggacacagccgtctatacttgttattatcaatccctcagtagtcctaactacggtcaaacgatctggggccaggggacccaggtcaccgtctcctca

SEQ ID NO: 3405 - DNA, 360 bp, synthetic construct
  source 1..360: mol_type = other DNA
gaggtgcagctggtggagtctgggggagacttggtgcaggctggggggtctctgagactctcctgtgcagcctctggaagcatcgtcagtaccaaagccatgggatggcaccgccaggttccagggaagcgacgcgagttggtcgcaggtattcgtagtgatggatttacaaactatgcggactccgtgaagggccgattcaccatctccagcgatagcgtcaacgacacggtgtatctgcagatgaacagcctgaaagctgaagacacagccgtctatttttgtttttatcaatccctcagtactcctaattacggccaaaccttctggggccaggggacccaggtcaccgtctcctca

SEQ ID NO: 3406 - DNA, 360 bp, synthetic construct
  source 1..360: mol_type = other DNA
gaggtgcagctggtggagtctgggggagacttggtgcaggctggggggtctctgagactctcctgtgcagcctctggaagcatcgtcagtaccaaagccatgggatggcaccgccaggttccagggaagcgacgcgagttggtcgcaggtattcgtagtgatggatttacaaactatgcggactccgtgaagggccgattcatcatctccagcgatagcgtcaacgacacggtgtatctgcagatgaacagcctgaaagctgaagacacagccgtctatttttgtttttatcaatccctcggtactcctaattacggccaaaccttctggggccaggggacccaggtcaccgtctcctca

SEQ ID NO: 3407 - DNA, 360 bp, synthetic construct
  source 1..360: mol_type = other DNA
gaggtgcagctggtggagtctgggggagacttggtgcaggctggggggtctctgagactctcctgtgcagcctctggaagcatcgtcagtaccaaagccatgggatggcaccgccaggttccagggaagcgacgcgagttggtcgcaggtattcgtagtgatggatttacaaactatgcggactccgtgaagggccgattcaccatctccagcgatagcgtcaacgacacggtgtatctgcagatgaacagcctgaaagctgaggacacagccgtctatttttgtttttatcactccctcagtactcctaattacggccaaaccttctggggccaggggacccaggtcaccgtctcctca

SEQ ID NO: 3408 - DNA, 360 bp, synthetic construct
  source 1..360: mol_type = other DNA
gaggtgcagctggtggagtctgggggagacttggtgcaggctggggggtctctgagactctcctgtgcagcctctggaagcatcgtcagtaccaaagccatgggatggcaccgccaggttccagggaagcgacgcgagttggtcgcaggtattcgtagtgatggatttacaaactatgcggactccgtgaagggccgattcaccatctccagcgatagcgtcaacgacacggtgtatctgcagatgaacagcctgaaagcggaagacacagccgtctatttttgtttttatcaatccctcagtactcctaattccggccaaaccttctggggccaggggacccaggtcaccgtctcctca

SEQ ID NO: 3409 - DNA, 360 bp, synthetic construct
  source 1..360: mol_type = other DNA
gaggtgcagctggtggagtctgggggagacttggtgcaggctggggggtctctgagactctcctgtgcagcctctggaagcatcgtcagtaccaatagcatgggctggcaccgccaggttccagggaagcgacgcgagttggtcgcaggtattcgtagtgatggattcataaactatgcggactccgtgaagggccgattcaccatctccagcgataacgtcaacaacacggtgtatctgcagatgaacagcctgaaacctgaggacacagccgtctatttgtgtttttatcaatccctcagttctcctaattacggccaaaccttctggggccaggggacccaggtcaccgtctcctca

SEQ ID NO: 3410 - DNA, 360 bp, synthetic construct
  source 1..360: mol_type = other DNA
gaggtgcagctggtggagtctgggggagacttggtgcaggctggggggtctctgagactctcctgtgcagcctctggaagcatcgtcagtaccaatagcatgggctggcaccgccaggttccagggaagcgacgcgagttggtcgcaggtattcgtagtgatggattcataaactatgcggactccgtgaagggccgattcaccatctccagcgataacgtcaacaacacggtgtatctgcagatgaacagcctgaaacctgaggacacagccgtctatttgtgtttttatcaatccctcagtagtgctaattacggccaagtcttctggggccaggggacccaggtcaccgtctcctca

SEQ ID NO: 3411 - DNA, 360 bp, synthetic construct
  source 1..360: mol_type = other DNA
gaggtgcagctggtggagtctgggggagacttggtgcgggctggggggtctctgagactctcctgtgcagcctctggcagcatcgtcagtaccaatagcatgggctggcaccgccaggtcccagggaagcgacgcgagttggtcgcaggtattcgtagtgatggattcataaactatgcggactccgtgaagggccgattcaccatctccagcgataacgtcaacaacacggtgtatctgcagatgaacagcctgaaacctgaggacacagccgtctatttgtgtttttatcaatccctcagtactcctacttacggccaagtcttctggggccaggggacccaggtcaccgtctcctca

SEQ ID NO: 3412 - DNA, 360 bp, synthetic construct
  source 1..360: mol_type = other DNA
gaggtgcagctggtggagtctgggggagacttggtgcaggctggggggtctctgagactctcctgtgcagcctctggaagcatcgtcagtaccaatagcatgggctggcaccgccaggttccagggaagcgacgcgagttggtcgcaggtattcgtagtgatggattcataaactatgcggactccgtgaagggccgattcaccatctccagcgataacgtcaacaacacggtgtatctgcagatgaacagcctgaaacctgaggacacagccgtctatttgtgtttttatcaatccctcagtactcctaattacggccaagtctcctggggccaggggacccaggtcaccgtctcctca

SEQ ID NO: 3413 - DNA, 360 bp, synthetic construct
  source 1..360: mol_type = other DNA
gaggtgcagctggtggagtctgggggagacttggtgcaggctggggggtctctgagactctcctgtgcagcctctggaagcatcgtcagtaccaatagtatgggctggcaccgccaggttccagggaagcgacgcgagttggtcgcaggtattcgtagtgatggattcataaactatgcggactccgtgaagggccgattcaccatctccagcgataacgtcaacaacacggtgtatctgcagatgaacagcctgaaacctgaggacacagccgtctatttgtgtttttatcaatccatcagtactcctaattacggccaagtcttctggggccaggggacccaggtcaccgtctcctca

SEQ ID NO: 3414 - DNA, 360 bp, synthetic construct
  source 1..360: mol_type = other DNA
gaggtgcagctggtggagtctgggggaggattggtgcaggctggggggtctctgagactctcctgtgcagcctctggaagcatcttcagtaccaatgccatgggctggtaccgccaggctccagggaagccgcgcgagttggtcgcaggtattcatagtaatggtataacaacgtatgcggactccgtgaagggccgattcaccatctccagagataacgtcaagaacacggtgtatctgcagatgaacagcctgaaacctgaggacacagccgtctatgactgttattatcaatccctcagtagtactaattacggccaagccttctggggccaggggactcaggtcaccgtctcctca

SEQ ID NO: 3415 - DNA, 360 bp, synthetic construct
  source 1..360: mol_type = other DNA
gaggtgcagctggtggagtctgggggagacttggtgcaggctggggggtctctgagactctcctgtgcagcctctgggagcatcgtcagtaccaaagccatgggctggcaccgccaggttccagggaagcgacgcgagttggtcgcaggtattcgcagtgatggatttacaaactatgcggactccgtgaagggccgattcaccatctccagcgatagcgtcaacgacacggtgtatctgcagatgaacagcctgaaagctgaagacacagccgtctatttttgtttttctcaatccctcagtactcctaattacggccaaaccttctggggccaggggacccaggtcaccgtctcctca

SEQ ID NO: 3416 - DNA, 360 bp, synthetic construct
  source 1..360: mol_type = other DNA
gaggtgcagctggtggagtctgggggagacttggtgcaggctggggggtctctgagactctcctgtgcagcctctggaagcatcgtcagtaccaatgccatgggatggcaccgccaggttccagggaagggacgcgagttggtcgcaggctttcgtagtgatggatttacaaactatgcggactccgtgaagggccgattcaccatctccagcgataacgtcaagaacacggtgtatctgcagatgaacagcctgaaagctgaggacacagccgtctatttttgtttttatcaatccctcagtactcctaagttcggtcaaacgttctggggccaggggacccaggtcaccgtctcctca

SEQ ID NO: 3417 - DNA, 360 bp, synthetic construct
  source 1..360: mol_type = other DNA
gaggtgcagctggtggagtctgggggagacttggtgcaggctggggggtctctgagactctcctgtgcagcctctggaagcatcgtcagtaccaatggcatgggatggcaccgccaggttccagggaagggacgcgagttggtcgcaggtattcgtagtgatggatttacaaactatgcggactccgtgaagggccgattcaccatctccagcgataacgtcaagaacacggtgtatctgcagatgaacagcctgaaagctgaggacacagccgtctatttttgtttttatcaatccctcagttctcctaattacggccaaaccttctggggccaggggacccaggtcaccgtctcctca

SEQ ID NO: 3418 - DNA, 360 bp, synthetic construct
  source 1..360: mol_type = other DNA
gaggtgcagctggtggagtctgggggagacttggtgcaggctggggggtctctgagactctcctgtgcagcctctggaagcatcgtcagtacgaatggcatgggatggcaccgccaggttccagggaagggccgcgagttggtcgcaggtattcgtagtgatggatttacaaactatgcggactccgtgaagggccgattcaccatctccagcgataacgtcaagaacacggtgtatctgcagatgaacagcctgaaagctgaggactcaggcgtctatttttgttcttatcaagccctcagttctcctaattccggccaaaccttctggggccaggggacccaggtcaccgtctcctca

SEQ ID NO: 3419 - DNA, 360 bp, synthetic construct
  source 1..360: mol_type = other DNA
gaggtgcagctggtggagtctgggggagacttggtgcaggctggggggtctctgagactctcctgtgcagcctctggaagcatcgtcagtaccaatggcatgggatggcaccgccaggttccagggaagggacgcgagttggtcgcaggtattcgtagtgatggatttacaaactatgcggactccgtgaagggccgattcaccatctccagcgataacgtcaagaacacggtgtatctgcagatgaacagcctgaaagctgaggacacagccgtctatttttgtttttatcaatccctcagtagtgctaattacggccaagtcttctggggccaggggacccaggtcaccgtctcctca

SEQ ID NO: 3420 - DNA, 360 bp, synthetic construct
  source 1..360: mol_type = other DNA
gaggtgcagctggtggagtctgggggagacttggtgcaggctggggggtctctgagactcgcctgtgcagcctctggaagcatcgtcagtaccaatagcatgggctggcaccgccaggttccagggaagcgacgcgagttggtcgcaggtattcgtagtgatggattcataaactatgcggactccgtgaagggccgattcaccatcttcagcgataacgtcaacaacacggtgtatctgcagatgaacagcctgaaacctgaggacacagccgtctatttgtgtttttatcaatccctcagtactcataattacggccaagtcttctggggccgggggacccgggtcaccgtctcctca

SEQ ID NO: 3421 - DNA, 360 bp, synthetic construct
  source 1..360: mol_type = other DNA
gaggtgcagctggtggagtctgggggagacttggtgcaggctggggggtctctgagactctcctgtgcagcctctggaagcatcgtcagtaccaatagtatgggctggcaccgccaggttccagggaagcgacgcgagttagtcgcaggtattcgtagtgatggattcataaactatgcggactccgtgaagggccgattcaccatctccagcgataacgtcaacaacacggtgtatctgcagatgaacagcctgaaacctgaggacacagccgtctatttgtgtttttatcaatccctcagtactcctaattacggcaaagtcttctggggccaggggacccaggtcaccgtctcctca

SEQ ID NO: 3422 - DNA, 360 bp, synthetic construct
  source 1..360: mol_type = other DNA
gaggtgcagctggtggagtctgggggagacttggtgcaggctggggggtctctgagactctcctgtgcagcctctggaagcatcgtcagtaccaatagcatgggctggcaccgccaggttccagggaagcgacgcgagttggtcgcaggtattcgtagtgatggattcataaactatgcggactccgtgaagggccgattcaccatctccagcgataacgtcaacaacacggtgtatctgcagatgaacagcctgaaacctgaggacacagccgtctatttgtgtttttatcaatccctcagtactcctaattacggccaagtctactggggccaggggacccaggtcaccgtctcctca

SEQ ID NO: 3423 - DNA, 360 bp, synthetic construct
  source 1..360: mol_type = other DNA
gaggtgcagctggtggagtctgggggagacttggtgcaggctggggggtctctgagactctcctgtgcagcctctggaagcatcgtcagtaccaatagcatgggctggcaccgccaggttccagggaagcgacgcgagttggtcgcaggtattcgtagtgatggattcataaactatgcggactccgtgaagggccgattcaccatctccagcgataacgtcaacaacacggtgtatctgcagatgaacagcctgaaacctgaggacacagccgtctatttgtgtttttatcaatccctcaggactcctaattacggccaagtcttctggggccaggggacccaggtcaccgtctcctca

SEQ ID NO: 3424 - DNA, 360 bp, synthetic construct
  source 1..360: mol_type = other DNA
gaggtgcagctggtggagtctgggggagacttggtgcaggctggggggtctctgagactctcctgtgcagcctctggaagcatcgtcagtacccgtgccatgggatggcaccgccaggttccagggaagcgacgcgagttggtcgcaggtcttcgtagtgatggatttacaaactatgcggactccgtgaagggccgattcaccatctccagcgataacgtcaagaacacggtgcatctgcagatgaacagcctgaaagctgaggacacagccgtctatttttgtttttatcaatccctcagttctcctaattacggccaaaccttctggggccaggggacccaggtcaccgtctcctca

SEQ ID NO: 3425 - DNA, 360 bp, synthetic construct
  source 1..360: mol_type = other DNA
gaggtgcagctggtggagtctgggggagacttggtgcaggctggggggtctctgagagtctcctgtgcagcctctggaagcatcttcaggaccgatgccatgggctggcaccgccaggttccagggaagcagcgcgagtttgtcgcgggtattcgtagtgatggatacacaaactatgcggactccgtgaagggccgattcaccatctccagggataccgtcaagaacacggtgtatctgcagatgaacagcctgaaacctgaggacacagccgtctatagctgttattatcaatccctcagtagtcctaattacggccaaacgatctggggccaggggacccaggtcaccgtctcctca

SEQ ID NO: 3426 - DNA, 360 bp, synthetic construct
  source 1..360: mol_type = other DNA
gaggtgcagctggtggagtctgggggagacttggtgcaggctggggggtctctgagactctcctgtgcagcctctggaagcatcgtcagttcccgtagcatgggctggcaccgccaggttccagggaagcgacgcgaattggtcgcaggtattcgtagtgatggattcataaactatgcggactccgtgaagggccgattcaccatctccagcgataacgtcaacaacacggtgtatctgcagatgaacagcctgaaacctgaggacacagccgactatttgtgtttttatcaatccctcagtactcctaattacggccaagtctcctggggccaggggacccaggtcaccgtctcctca

SEQ ID NO: 3427 - DNA, 360 bp, synthetic construct
  source 1..360: mol_type = other DNA
gaggtgcagctggtggagtctgggggagacttggtgcaggctggggggtctctgagactctcctgtgcagcctctggaagcatcgtcagttcccgtagcatgggctggcaccgccaggttccagggaagcgacgcgaattggtcgcaggtattcgtagtgatggattcataaactatgcggactccgtgaagggccgattcaccatctccagcgataacgtcaacaacacggtgtatctgcagatgaacagcctgaaacctgaggacacagccgtctatttgtgtttttatcaatccctcagtactcctaattacggcaaagtcttctggggccaggggacccaggtcaccgtctcctca

SEQ ID NO: 3428 - DNA, 360 bp, synthetic construct
  source 1..360: mol_type = other DNA
gaggtgcagctggtggagtctgggggagacttggtgcaggctggggggtctctgagactctcctgtgcagcctctggaagcatcgtcagtaccaataacatgggctggcaccgccaggttccagggaagggacgcgagttggtcgcaggtattcgtagtgatggattcataaactatgcggactccgtgaagggccgattcaccatctccagcgataacgtcaagaacacggtgtatctgcagatgaacagcctgaaacctgaggacacagccgtctatttgtgtttttatcaatccctcagtactcctaattacggccacgtgttctggggccaggggacccaggtcaccgtctcctca

SEQ ID NO: 3429 - DNA, 360 bp, synthetic construct
  source 1..360: mol_type = other DNA
gaggtgcagctggtggagtctgggggaggcttggtgcaggctggggggtctctgagactctcctgtgcagcctctggaaacatcgtcagttccaatagcatgggctggcaccgccaggttccagggaagcgacgcgagttggtcgcgggtattcgtagtgatggattcataaactatgcggactccgtgaagggccgattcaccatctccagcgataacgtcaacaacacggtgtatctgcagatgaacagcctgaaacctgaggacacagccgtctatttgtgtttttatcaatccctcagtcatcctaattacggccatgtcttctggggccaggggacccaggtcaccgtctcctca

SEQ ID NO: 3430 - DNA, 360 bp, synthetic construct
  source 1..360: mol_type = other DNA
gaggtgcagctggtggagtctgggggagacttggtgcaggctggggggtctctgagactctcctgtgcagcctctggaagcatcgtcagtaccaaagccatgggatggcaccgccaggttccagggaagcgacgcgagttggtcgcaggtattcgtagtgatggatttacaaactacgcggactccgtgaagggccgattcaccatctccagcgatagcgtcaacgacacggtgtatctgcagatgaacagcctgaaagctgaagacacagccgtctatttttgtttttatcaatccctcagttctcctaattacggccaaaccttctggggccaggggacccaggtcaccgtctcctca

SEQ ID NO: 3431 - DNA, 360 bp, synthetic construct
  source 1..360: mol_type = other DNA
gaggtgcagctggtggagtctgggggaggcttggtgcaggctggggggtctctgagactctcctgtgcagcctctggaagcatcgtcagtaccaaagccatgggatggcaccgccaggttccagggaagcgacgcgagttggtcgcaggtattcgtagtgatggatttacaaactatgcggactccgtgaagggccgattcaccatctccagcgatagcgtcaacgacacggtgtatctgcagatgaacagcctgaaagctgaagacacagccgtctatttttgtttttatcaacccctcagtactcctaattacggccaaaccttctggggccaggggacccaggtcaccgtctcctca

SEQ ID NO: 3432 - DNA, 360 bp, synthetic construct
  source 1..360: mol_type = other DNA
gaggtgcagctggtggagtctgggggagacttggtgcaggctggggggtctctgagactctcctgtgcagcctctggaagcatcgtcagtaccaaagccatgggatggcaccgccaggttccagggaagcgacgcgagttggtcgcaggtattcgtagtgatggatttactaactatgcggactccgtgaagggccgattcaccatctccagcgatagcgtcaacgacacggtgtatctgcagatgaacagcctgaaagctgaagacacagccgtctatttttgtttttatcaatccctccgtactcctaattacggccaaaccttctggggccaggggacccaggtcaccgtctcctca

SEQ ID NO: 3433 - DNA, 360 bp, synthetic construct
  source 1..360: mol_type = other DNA
gaggtgcagctggtggagtctgggggagacttggtgcaggctggggggtctctgagactctcctgtgcagcctctggaagcatcgtcagtaccaaagccatgggatggcaccgccaggttccagggaagcgacgcgagttggtcgcaggtattcgtagtgatggatttacaaactatgcggactccgtgaagggccgattcaccatctccagcgatagcgtcaacgacacggtgtatctgcagatgaacagcctgaaagctgaagacacagccgtctatttttgtttttatcaatccctcagtactcctaattacggccacaccttctggggccaggggacccaggtcaccgtctcctca

SEQ ID NO: 3434 - DNA, 360 bp, synthetic construct
  source 1..360: mol_type = other DNA
gaggtgcagctggtggagtctgggggggacttggtgcaggctggggggtctctgaggctctcctgtgcagcctctggaagcatcgtcagtaccaaagccatgggatggcaccgccaggttccagggaagcgacgcgagttggtcgcaggtattcgtagtgatggatttacaaactatgcggactccgtgaagggccgattcaccatctccagcgatagcgtcaacggcacggtgtatctgcagatgagcagcctgaaagctgaagacacagccgtctatttttgtttttatcaatccctcagtactcctaatcacggccaaaccttctggggccaggggacccaggtcaccgtctcctca

SEQ ID NO: 3435 - DNA, 360 bp, synthetic construct
  source 1..360: mol_type = other DNA
gaggtgcagctggtggagtctgggggagacttggtgcaggctggggggtctctgagactctcctgtgcagcctctggaagcatcgtcagtaccaaagccatgggatggcaccgccaggttccagggaagcgacgcgagttggtcgcaggtattcgtagtgatggatttacaaactatgcggactccgtgaagggccgattcaccatctccagcgatagcgtcaacgacacggtgtatctgcagatgaacagcctgaaagctgaagacacagccgtctatttttgtttttatcaatccctcagtactcctaattacggccaaacctactggggccaggggacccaggtcaccgtctcctca

SEQ ID NO: 3436 - DNA, 360 bp, synthetic construct
  source 1..360: mol_type = other DNA
gaggtgcagctggtggagtctgggggagacttggtgcaggctggggggtctctgagactctcctgtgcagcctctggaagcatcgtcagtaccaaagccatgggatggcaccgccaggttccagggaagcgacgcgagttggtcgcaggtattcgtagtgatggatttacaaactatgcggactccgtgaagggccgattcaccatctccagcgatagcgtcaacgacacggtgtatctgcagatgaacagcctgaaagctgaagacacagccgtctatttttgtttttatcaatccctcagtactcctacttacggccaaaccttctggggccaggggacccaggtcaccgtctcctca

SEQ ID NO: 3437 - DNA, 360 bp, synthetic construct
  source 1..360: mol_type = other DNA
gaggtgcagctggtggagtctgggggagacttggtgcaggctggggggtctctgagactctcctgtgcagcctctggaagcatcgtcagtaccaatgccatgggatggcaccgccaggttccagggaagggacgcgagttggtcgcaggctttcgtagtgatggatttacaaactatgcggactccgtgaagggccgattcaccatctccagcgataacgtcaagaacacggtgtatctgcagatgaacagcctgaaagctgaggacacagccgtctatttttgtttttatcaatccctcagttctcctaattacggccaaaccttctggggccaggggacccaggtcaccgtctcctca

SEQ ID NO: 3438 - DNA, 360 bp, synthetic construct
  source 1..360: mol_type = other DNA
gaggtgcagctggtggagtctgggggagacttggtgcaggctggggggtctctgagactctcctgtgcagcctctggaagcatcgtcagtaccaatgccatgggatggcaccgccaggttccagggaagggacgcgagttggtcgcaggctttcgtagtgatggatttacaaactatgcggactccgtgaagggccgattcaccatctccagcgataacgtcaagaacacggtgtatctgcagatgaacagcctgaaagctgaggacacagccgtctatttttgtttttatcaatccctcagtactcctaattccggtcaaacgttctggggccaggggacccaggtcaccgtctcctca

SEQ ID NO: 3439 - DNA, 360 bp, synthetic construct
  source 1..360: mol_type = other DNA
gaggtgcagctggtggagtctgggggagacttggtgcaggctggggggtctctgagactctcctgtgcagcctctggaagcatcgtcagtaccaatgccatgggatggcaccgccaggttccagggaagggacgcgagttggtcgcaggctttcgtagtgatggatttacaaactatgcggactccgtgaagggccgattcaccatctccagcgataacgtcaagaacacggtgtatctgcagatgaacagcctgaaagctgaggacacagccgtctatttttgtttttatcaatccctcagtactcctattttcggtcaaacgttctggggccaggggacccaggtcaccgtctcctca

SEQ ID NO: 3440 - DNA, 360 bp, synthetic construct
  source 1..360: mol_type = other DNA
gaggtgcagctggtggagtctgggggagacttggtgcaggctggggggtctctgagactctcctgtgcagcctctggaagcatcgtcagtacgaatggcatgggatggcaccgccaggttccagggaagggacgcgagttggtcgcaggtattcgtagtgatggatttacaaactatgcggactccgtgaagggccgattcaccatctccagcgatagcgtcaacgacacggtgtatctgcagatgaacagcctgaaagctgaagacacagccgtctatttttgtttttatcaacccctcagtactcctaattacggccaaaccttctggggccaggggacccaggtcaccgtctcctca

SEQ ID NO: 3441 - DNA, 360 bp, synthetic construct
  source 1..360: mol_type = other DNA
gaggtgcagctggtggagtctgggggagacttggtgcaggctggggggtctctgagactctcctgtgcagcctctggaagcatcgtcagtacgaatggcatgggatggcaccgccaggttccagggaagggccgcgagttggtcgcaggtattcgtagtgatggatttacaaactatgcggactccgtgaagggccgattcaccatctccagcgataacgtcaagaacacggtgtatctgcagatgaacagcctgaaagctgaggactcaggcgtctatttttgtgattatcaagccctcagttctccgaagtacggccaaaccttctggggccaggggacccaggtcaccgtctcctca

SEQ ID NO: 3442 - DNA, 360 bp, synthetic construct
  source 1..360: mol_type = other DNA
gaggtgcagctggtggagtctgggggagacttggtgcaggctggggggtctctgagactctcctgtgcagcctctggaagcatcgtcagtacgaatggcatgggatggcaccgccaggttccagggaagggccgcgagttggtcgcaggtattcgtagtgatggatttacaaactatgcggactccgtgaagggccgattcaccatctccagcgataacgtcaagaacacggtgtatctgcagatgaccagcctgaaagctgaggactcaggcgtctatttttgttattatcaagccctcagttctcctaattacggccaaaccttctggggccaggggacccaggtcaccgtctcctca

SEQ ID NO: 3443 - DNA, 360 bp, synthetic construct
  source 1..360: mol_type = other DNA
gaggtgcagctggtggagtctgggggagacttggtgcaggctggggggtctctgagactctcctgtgcagcctctggaagcatcgtcagtaccaatagcacgggctggcaccgccaggttccagggaaacaacgcgagttggtcgcaggtattcgtagtgatggattcataaactatgcagacgccgtgaagggccgattcaccatctccagcgataacgtcaacaacacggtgtatctgcagatgaacagcctgaaacctgaggacacagccgtctatttgtgtttttatcaatccctcagtactcctaattttggccaagtcttctggggccaggggacccaggtcaccgtctcctca

SEQ ID NO: 3444 - DNA, 360 bp, synthetic construct
  source 1..360: mol_type = other DNA
gaggtgcagctggtggagtctgggggaggcttggtgcaggctggggggtctctgagactctcctgtgcagcctctggaagcatcgtcagtaccaatagcatgggctggcaccgccaggttccagggaaacaacgcgagttggtcgcaggtattcgtagtgatggattcataaactatgcagacgccgtgaagggccgattcaccatctccagcgataacgtcaacaacacggtgtatctgcagatgaacagcctgaaacctgaggacacagccgtctatttgtgtttttatcaatccctcagtactcctaattttggccaagtcttctggggccaggggacccaggtcaccgtctcctca

SEQ ID NO: 3445 - DNA, 360 bp, synthetic construct
  source 1..360: mol_type = other DNA
gaggtgcagctggtggagtctgggggagacttggtgcaggctggggggtctctgagactctcctgtgcagcctctggaagcatcgtcagtaccaatagcatgggctggcaccgccaggttccagggaagcgacgcgagttggtcgcaggtattcgtagtgatggattcataaactatgctgactccgtgaagggccgattcaccatctccagcgataacgtcaacaacacggtgtatctgcagatgaacagcctgaaacctgaggacacagccgtctatttgtgtttttaccaatccctcagtactcctaattacggcctggtcttctggggccaggggacccaggtcaccgtctcctca

SEQ ID NO: 3446 - DNA, 360 bp, synthetic construct
  source 1..360: mol_type = other DNA
gaggtgcagctggtggagtctgggggagacttggtgcaggctggggggtctctgagactctcctgtgcagcctctggaagcatcgtcagtaccaatagcatgggctggcaccgccaggttccagggaagcgacgcgagttggtcgcaggtattcgtagtgatggattcataaactatgcggactccgtgaagggccgattcaccatctccagcgataacgtcaacaacacggtgtatctgcagatgaacagcctgaaacctgaggacacagccgtctatttgtgtttttatcaatccctcagtactcctaattacggccgagtcttctggggccaggggacccaggtcaccgtctcctca

SEQ ID NO: 3447 - DNA, 360 bp, synthetic construct
  source 1..360: mol_type = other DNA
gaggtgcagctggtggagtctgggggagacttggtgcaggctggggggtctctgagactctcctgtgcagcctctggaagcatcgtcagtaccaatagcatgggctggcaccgccaggttccagggaagcgacgcgagttggtcgcaggtattcgtagtgatggattcataaactatgcggactccgtgaagggccgattcaccatctccagcgataacgtcaacaacacggtgtatctgcagatgaacagcctgaaacctgaggacacagccgtctatttgtgtttttatcaatccctcagtgctcctaattacggccaagtcttctggggccaggggacccaggtcaccgtctcctca

SEQ ID NO: 3448 - DNA, 360 bp, synthetic construct
  source 1..360: mol_type = other DNA
gaggtgcagctggtggagtctgggggagacttggtgcaggctggggggtctctgagactctcctgtgcagcctctggaagcatcgtcagtaccaatagcatgggctggcaccgccaggttccagggaagcgacgcgagttggtcgcaggtattcgtagtgatggattcataaactatgcggactccgtgaagggccgattcaccatctccagcgataacgtcaataacacggtgtatctgcagatgaacagcctgaaacctgaggacacagccgtatatttgtgtttttatcaatccctcagtactcctaattacgtccaggtcttctggggccaggggacccaggtcaccgtctcctca

SEQ ID NO: 3449 - DNA, 360 bp, synthetic construct
  source 1..360: mol_type = other DNA
gaggtgcagctggtggagtctgggggagacttggtgcaggctggggggtctctgagactctcctgtgcagcctctggaagcatcgtcagtaccaatagcatgggctggcaccgccaggttccagggaagcgacgcgagttggtcgcaggtattcgtagtgatggattcataaactatgcggactccgtgaagggccgattcaccatctccagcgataacgtcaacaacacggtgtatctgcagatgaacagccttaaacctgaggacacagccgtttatttgtgtttttatcaatccctcattactcctaattacggccaagtcttctggggccaggggacccaggtcaccgtctcctca

SEQ ID NO: 3450 - DNA, 360 bp, synthetic construct
  source 1..360: mol_type = other DNA
gaggtgcagctggtggagtctgggggagacttggtgcaggctggggggtctctgagactctcctgtgcagcctctggaagcatcgtcagtaccaatagcatgggctggcaccgccaggttccagggaagcgacgcgagttggtcgcaggtattcgtagtgatggattcataaactatgcggactccgtgaagggccgattcaccatctccagcgataacgtcaacaacacggtgtatctgcagatgaacagcctgaaacctgaggacacagccgtctatttgtgtttttatcaatccctcagtactcctaattacggccaactcttcttaggccaggggacccaggtcaccgtctcctca

SEQ ID NO: 3451 - DNA, 360 bp, synthetic construct
  source 1..360: mol_type = other DNA
gaggtgcagctggtggagtctgggggagacttggtgcaggctggggggtctctgagactcgcctgtgcagcctctggaagcatcgtcagtaccaatagcatgggctggcaccgccaggttccagggaagcgacgcgagttggtcgcaggtattcgtagtgatggattcataaactatgcggactccgtgaagggccgattcaccatcttcagcgataacgtcaacaacacggtgtatctgcagatgaacagcctgaaacctgaggacacagccgtctatttgtgtttttatcaatccctcagtactcataattacggccaagtcttctggggccaggggacccaggtcaccgtctcctca

SEQ ID NO: 3452 - DNA, 360 bp, synthetic construct
  source 1..360: mol_type = other DNA
gaggtgcagctggtggagtctgggggagacttggtgcaggctggggggtctctgagactctcctgtgcagcctctggaagcatcgtcagtaccaatagcatgggctggcaccgccaggttccagggaggcgacgcgagttggtcgcaggtattcgtagtgatggattcataaactatgctgactccgtgaagggccgattcaccatctccagcgataacgtcaacaacacggtgtatctgcagatgaacagcctgaaacctgaggacacagccgtctatttgtgtttttatcaatccctcagtactcctaattacggccgagtcttctggggccaggggacccaggtcaccgtctcctca

SEQ ID NO: 3453 - DNA, 360 bp, synthetic construct
  source 1..360: mol_type = other DNA
gaggtgcagctggtggagtctgggggagacttggtgcaggctggggggtctctgagactctcctgtgcagcctctggaagcatcgtcagtacccgtgccatgggatggcaccgccaggttccagggaagcgacgcgagttggtcgcaggtcttcgtagtgatggatttacaaactatgcggactccgtgaagggccgattcaccatctccagcgataacgtcaagaacacggtgcatctgcagatgaacagcctgaaagctgaggacacagccgtctatttttgtttttatcactccctcagtactcctaattacggccaaaccttctggggccaggggacccaggtcaccgtctcctca

SEQ ID NO: 3454 - DNA, 360 bp, synthetic construct
  source 1..360: mol_type = other DNA
gaggtgcagctggtggagtctgggggagacttggtgcaggctggggggtctctgagactctcctgtgcagcctctggaagcatcgtcagtacccgtgccatgggatggcaccgccaggttccagggaagcgacgcgagttggtcgcaggtcttcgtagtgatggatttacaaactatgcggactccgtgaagggccgattcaccatctccagcgataacgtcaagaacacggtgcatctgcagatgaacagcctgaaagctgaggacacagccgtctatttttgtttttatcaatccctcagtactcctaattacggccacaccttctggggccaggggacccaggtcaccgtctcctca

SEQ ID NO: 3455 - DNA, 360 bp, synthetic construct
  source 1..360: mol_type = other DNA
gaggtgcagctggtggagtctgggggagacttggtgcaggctggggggtctctgagactctcctgtgcagcctctggaagcatcgtcagtacccgtgccatgggatggcaccgccaggttccagggaagcgacgcgagttggtcgcaggtcttcgtagtgatggatttacaaactatgcggactccgtgaagggccgattcaccatctccagcgataacgtcaagaacacggtgcatctgcagatgaacagcctgaaagctgaggacacagccgtctatttttgtttttatcaatccctccgtactcctaattacggccaaaccttctggggccaggggacccaggtcaccgtctcctca

SEQ ID NO: 3456 - DNA, 360 bp, synthetic construct
  source 1..360: mol_type = other DNA
gaggtgcagctggtggagtctgggggagacttggtgcaggctggggggtctctgagactctcctgtgcagcctctggaagcatcgtcagtacccgtgccatgggatggcaccgccaggttccagggaagcgacgcgagttggtcgcaggtcttcgtagtgatggatttacaaactatgcggactccgtgaagggccgattcaccatctccagcgataacgtcaagaacacggtgcatctgcagatgaacagcctgaaagctgaggacacagccgtctatttttgtttttctcaatccctcagtactcctaattacggccaaaccttctggggccaggggacccaggtcaccgtctcctca

SEQ ID NO: 3457 - DNA, 360 bp, synthetic construct
  source 1..360: mol_type = other DNA
gaggtgcagctggtggagtctgggggagacttggtgcaggctggggggtctctgagactctcctgtgcagcctctggaagcatcgtcagtacccgtgccatgggatggcaccgccaggttccagggaagcgacgcgagttggtcgcaggccttcgtagtgatggatttacaaactatgcggactccgtgaagggccgattcaccatctccagcgataacgtcaagaacacggtgcatctgcagatgaacagcctgaaagctgaggacacagccgtctatttttgtttttatcaatccctcagtactcctaatgacggccaaaccttctggggccaggggacccaggtcaccgtctcctca

SEQ ID NO: 3458 - DNA, 360 bp, synthetic construct
  source 1..360: mol_type = other DNA
gaggtgcagctggtggagtctgggggagacttggtgcaggctggggggtctctgagactcgcctgtgcagcctctggaagcatcgtcagtaccaatagcatgggctggcaccgccaggttccagggaagcgacgcgagttggtcgcaggtattcgtagagatggattcataaactatgcggactccgtgaagggccgattcaccatcttcagcgataacgtcaacaacacggtgtatctgcagatgaacagcctgaaacctgaggacacagccgtctatttgtgtttttatcaatccctcagtactcataattacggccaagtcttctggggccgggggacccaggtcaccgtctcctca

SEQ ID NO: 3459 - DNA, 360 bp, synthetic construct
  source 1..360: mol_type = other DNA
gaggtgcagctggtggagtctgggggagacttggtgcaggctggggggtctctgagactctcctgtgcagcctctggaagcatcgtcagttcccgtagcatgggctggcaccgccaggttccagggaagcgacgcgaattggtcgcaggtattcgtagtgatggatccataaactatgcggactccgtgaagggccgattcaccatctccagcgataacgtcaacaacacggtgtatctgcagatgaacagcctgaaacctgaggacacagccgtctatttgtgtttttatcaatccctcggtactcctaattacggccaagtcttctggggccaggggacccaggtcaccgtctcctca

SEQ ID NO: 3460 - DNA, 360 bp, synthetic construct
  source 1..360: mol_type = other DNA
gaggtgcagctggtggagtctgggggaggctcggtgcaggctggggggtctctgaggctctcctgtgcagcctctggaagcatcttcagtctcaatggcatgggctggtaccgccaggctccagggaagcagcgcgagttggtcgcaggaattcgtagtgatggactggtaaattatggggactccgtgaagggccgattcaccatctccggagataacgccaagagcactgtgtatctgcagatgaacggcctgaaacctgaggacacagccgactatgattgttattatcaatccttcagtagtgctaattacggccaagtcttctggggccaggggacccaggtcaccgtctcctca

SEQ ID NO: 3461 - DNA, 360 bp, synthetic construct
  source 1..360: mol_type = other DNA
gaggtgcagctggtggagtctgggggaggctcggtgcaggctggggggtctctgaggctctcctgtgcagcctctggaagcatctttagtctcaatggcatgggctggtaccgccaggctccagggaagcagcgcgagttggtcgcaggaattcgtagtaatgatatggcaaattatggggactccgtgaagggccgattcaccatctccggagataatgccaagagcacggtgtatctgcagatgaacagcctgaaacctgaggacacagccgactattattgttattatcaatccctcagtagtgctaattacggccaagtcttctggggccaggggacccaggtcaccgtctcctca

SEQ ID NO: 3462 - DNA, 360 bp, synthetic construct
  source 1..360: mol_type = other DNA
gaggtgcagctggtggagtctgggggaggctcggtgcaggctggggggtctctgaggctctcctgtgcagcctctggaagcatcttcagtctcaatggcatgggctggtaccgccaggctccagggaagcagcgcgagttggtcgcaggaattcgtagtgatggtatggtaaattatggggactccgtgaagggccgattcaccatctccggagataacgccaagagcacggtgtatctgcagatgaacagcctgaaacctgaggacacagccgactattattgttattatcaatccctcggtagtgctaattacggccaagtcttctggggccaggggacccaggtcaccgtctcctca

SEQ ID NO: 3463 - DNA, 360 bp, synthetic construct
  source 1..360: mol_type = other DNA
gaggtgcagctggtggagtctgggggaggctcggtgcaggctggggggtctctgaggctctcctgtgcagcctctggaagcatcttcagtttcaatggcatgggctggtaccgccaggctccagggaagcagcgcgagttggtcgcaggaattcgtagtgatggtatggcaaattatggggactccgtgaagggccgattcaccatctccggagataacgccaagagcacggtgtatctgcagatgaacagcctgaaacctgaggacacagccgactattattgttattatcaatcctacagtagtgctaattacggccacgtcttctggggccaggggacccaggtcaccgtctcctca

SEQ ID NO: 3464 - DNA, 360 bp, synthetic construct
  source 1..360: mol_type = other DNA
gaggtgcagctggtggagtctgggggaggcttggtgcaggctggggggtctctgagactctcctgtgcagcctctacaagcatcttcagtgccaatggtatgggctggtaccgccaggctccagggaagcagcgcgagttggtcgcaggcgttcgtacggatgggttcttaaactatggggattccgtgaagggccgattcaccatctccagagataacgccaagaacacggtgtatctgcagatgaacatgctgaaacctgaggacacagccgactattactgttattatcaatccctcggtagtgctaattacggccaagtcttctggggccaggggacccaggtcaccgtctcctca

SEQ ID NO: 3465 - DNA, 360 bp, synthetic construct
  source 1..360: mol_type = other DNA
gaggtgcagctggtggagtctgggggaggctcggtgcaggctggggggtctctgaggctctcctgtgcagcctctggaagcatcttcagtctcaatggcatgggctggtaccgccaggctccagggaagcagcgcgagttggtcgcaggaattcgtagtgatggtatggtaaattatggggactccgtgaagggccgattcaccatctccggagataacgccaagagcacggtgtatctgcagatgaacagcctgaaacctgaggacacagccgactattattgttattatcaatccctcagtagtgctaattacggccgagtcttctggggccaggggacccaggtcaccgtctcctca

SEQ ID NO: 3466 - DNA, 360 bp, synthetic construct
  source 1..360: mol_type = other DNA
gaggtgcagctggtggagtctgggggaggcttggtgcaggctggggggtctctgaggctctcctgtgcagcctctggaagcatcttcagtctcaatggcatgggctggtaccgccaggctccagggaagcagcgcgagttggtcgcaggaattcgtagtgatggactggtaaattatggggactccgtgaagggccgattcaccatctccggagataacgccaagagcactgtgtatctgcagatgaacggcctgaaacctgaggacacagccgactatgattgttattatcaatccttcagtagtgctaattacggccaagtcttctggggccaggggacccaggtcaccgtctcctca

SEQ ID NO: 3467 - DNA, 360 bp, synthetic construct
  source 1..360: mol_type = other DNA
gaggtgcagctggtggagtctgggggaggctcggtgcaggctggagggtctctgaggctctcctgtgcagcctctggaagcaccttcagtttcaatggcatgggctggtaccgccaggctccagggaagcagcgcgagttggtcgcaggaattcgtagtgatggtatggcaaattatggggactccgtgaagggccgattcaccatctccggagataacgccaagagcacggtgtatctgcagatgaacagcctgaaacctgaggacacagccgactattattgttattatcaatcctacagtagtgctaattacggccacgtcttctggggccaggggacccaggtcaccgtctcctca

SEQ ID NO: 3468 - DNA, 360 bp, synthetic construct
  source 1..360: mol_type = other DNA
gaggtgcagctggtggagtctgggggaggctcggtgcaggctggggggtctctgaggctctcctgtgcagcctctggaagcatcttcagtctcaatggcatgggctggtaccgccaggctccagggaagcagcgcgagttggtcgcaggaattcgtagtaatgatatggcaaattatggggactccgtgaagggccgattcaccatctccggagataacgccaagagcacggtgtatctgcagatgaacagcctgaaacctgaggacacagccgactattattgttattatcactccctcagtagtgctaattacggccaagtcttctggggccaggggacccaggtcaccgtctcctca

SEQ ID NO: 3469 - DNA, 360 bp, synthetic construct
  source 1..360: mol_type = other DNA
gaggtgcagctggtggagtctgggggaggcttggtgcaggctggggggtctctgagactctcctgtgcagcctctggaagcatcttcagtggcaatggcatgggctggtaccgccaggctccagggaagcagcgcgagttggtcgcaggtattcatagtaatggtataacaaactatgcggactccgtgaagggccgattcaccatctccagagataacgtcaagaacacggtgtatctgcagatgaacagcctgaaacctgaggacacagccgtctattactgttattatcaatcttacagtagtgctaattacggccaagccttctggggccaggggacccaggtcaccgtctcctca

SEQ ID NO: 3470 - DNA, 360 bp, synthetic construct
  source 1..360: mol_type = other DNA
gaggtgcagctggtggagtctgggggaggcttggtgcaggctggggggtctctgagactctcctgtgcagcctctggaagcgtcttcagtggcaatggcatgggctggtaccgccaggctccagggaagcagcgcgagttggtcgcaggtattcatagtaatggtataacaaactatgcggactccgtgaagggccgattcaccatctccagagataacgtcaagaacacggtgtatctgcagatgaacagcctgaaacctgaggacacagccgtctattactgttattatcaatcttacagtagtgctaattacggccaagccttctggggccaggggacccaggtcaccgtctcctca

SEQ ID NO: 3471 - DNA, 360 bp, synthetic construct
  source 1..360: mol_type = other DNA
gaggtgcagctggtggagtctgggggaggctcggtgcaggctggggggtctctgaggctctcctgtgcagcctctggaagcgtcttcagtctcaatggcatgggctggtaccgccaggctccagggaagcagcgcgagttggtcgcaggaattcgtagtgatggtatggtaaattatggggactccgtgaagggccgattcaccatctccggagataacgccaagagcacggtgtatctgcagatgaacagcctgaaacctgaggacacagccgactattattgttattatcaatccctcagtagtgctaattacggccaagtctcctggggccaggggacccaggtcaccgtctcctca

SEQ ID NO: 3472 - DNA, 360 bp, synthetic construct
  source 1..360: mol_type = other DNA
gaggtgcagctggtggagtctgggggaggctcggtgcaggctggggggtctctgaggctctcctgtgcagcctctggaagcatcttcagtctcaatggcatgggctggtaccgccaggctccagggaagcagcgcgagttggtcgcaggaattcgtagtgatggtatggtaaattatggggactccgtgaagggccgattcaccatctccggagataacgccaagagcacggtgtatctgcagatgaacagcctgaaacctgaggacacagccgactattattgttattatcaatccctcagtagtgctaattacggccaagtcttctggggccaggggacccaggtcaccgtctcctca

SEQ ID NO: 3473 - DNA, 360 bp, synthetic construct
  source 1..360: mol_type = other DNA
gaggtgcagctggtggagtctgggggaggctcggtgcaggctggggggtctctgaggctctcctgtgcagcctctggaagcatcttcagtctcaatggcatgggctggtaccgccaggctccagggaagcagcgcgagttggtcgcaggaattcgtagtgatggtatggtaaattatggggactccgtgaagggccgattcaccatctccggagataacgccaagagcacggtgtatttgcagatgaacagcctgaaaccagaggacacagccgactattattgttattatcactccctcagtagtgctaattacggccaagtcttctggggccaggggacccaggtcaccgtctcctca

SEQ ID NO: 3474 - DNA, 360 bp, synthetic construct
  source 1..360: mol_type = other DNA
gaggtgcagctggtggagtctgggggaggctcggtgcaggctggggggtctctgaggctctcctgtgcagcctctggaagcatcttcagtctcaatggcatgggctggtaccgccaggctccagggaagcagcgcgagttggtcgcaggaattcgtagtgatggtatggtaaattatggggactccgtgaagggccgattcaccatctccggagataacgccaagagcacggtgtatctgcagatgaacagcctgaaacctgaggacacagccgactattattgttattatcaatccctcagtagtgctagttacggccaagtcttctggggccaggggacccaggtcaccgtctcctca

SEQ ID NO: 3475 - DNA, 360 bp, synthetic construct
  source 1..360: mol_type = other DNA
gaggtgcagctggtggagtctgggggaggctcggtgcaggctggggggtctctgaggctctcctgtgcagcctctggaagcatcttcagtctcaatggcatgggctggtaccgccaggctccagggaagcagcgcgagttggtcgcaggaattcgtagtgatggactggtaaattatggggactccgtgaagggccgattcaccatctccggagataacgccaagagcactgtgtatctgcagatgaacggcctgaaacctgaggacacagccgactatgattgttattatcaatcctacagtagtgctaattacggccaagtcctctggggccaggggacccaggtcaccgtctcctca

SEQ ID NO: 3476 - DNA, 360 bp, synthetic construct
  source 1..360: mol_type = other DNA
gaggtgcagctggtggagtctgggggaggctcggtgcaggctggggggtctctgaggctctcctgtgcagcctctggaagcatcttcagtttcaatggcatgggctggtaccgccaggctccagggaagcagcgcgagttggtcgcaggaattcgtagtgatggtatggcaaattatggggaccccgtgaagggccgattcaccatctccggagataacgccaagagcacggtgtatctgcagatgagcagcctgaaacctgaggacacagccgactattattgttattatcaatcctacagtagtgctagttacggccacgtcttctggggccaggggacccaggtcaccgtctcctca

SEQ ID NO: 3477 - DNA, 360 bp, synthetic construct
  source 1..360: mol_type = other DNA
gaggtgcagctggtggagtctgggggaggcttggtgcaggctggggggtctctgagactctcctgtgcagcctctggaagcatcttcagtttcaatggcatgggctggtaccgccaggctccagggaagcagcgcgagttggtcgcaggaattcgtagtgatggtatggcaaattatggggactccgtgaagggccgattcaccatctccggagataacgccaagagcacggtgtatctgcagatgaacagcctgaaacctgaggacacagccgactattattgttattatcaatcctacagtagtgctaattacggccacgtcttctggggccaggggacccaggtcaccgtctcctca

SEQ ID NO: 3478 - DNA, 360 bp, synthetic construct
  source 1..360: mol_type = other DNA
gaggtgcagctggtggagtctgggggaggcttggtgcaggctggggggtctctgagactctcctgtgcagcctctggaagcatcctcagtggcaatggcatgggctggtaccgccaggctccagggaagcagcgcgagttggtcgcaggtattcatagtaatggtataacaaactatgcggactccgtgaagggccgattcaccatctccagagataacgtcaagaacacggtgtatctgcagatgaacagcctgaaacctgaggacacagccgtctattactgttattatcaatcttacagtagtgctaattacggccaagccttctggggccaggggacccaggtcaccgtctcctca

SEQ ID NO: 3479 - DNA, 360 bp, synthetic construct
  source 1..360: mol_type = other DNA
gaggtgcagctggtggagtctgggggaggctcggtgcaggctggggggtctctgaggctctcctgtgcagcctctggaagcatcttcagtctcaatggcatgggctggtaccgccaggctccagggaagcagcgcgagttggtcgcaggaattcgtagtgatggtatggtaaattatggggactccgtgaagggccgattcaccatctccggagataacgccaagagcacggtgtatctgcagatgaacagcctgaaacctgaggacacagccgactattattgttatgatcaatccctcagtagtgctaattacggccaagtcttctggggccaggggacccaggtcaccgtctcctca

SEQ ID NO: 3480 - DNA, 360 bp, synthetic construct
  source 1..360: mol_type = other DNA
gaggtgcagctggtggagtctgggggaggctcggtgcaggctggggggtctctgaggctctcctgtgcagcctctggaagcatcttcagtctcaatggcatgggctggtaccgccaggctccagggaagcagcgcgagttggtcgcaggaattcgtagtgatggtatggtaaattatggggactccgtgaagggccgattcaccatctccggagataacgccaagagcacggtgtatctgcagatgaacagcctgaaacctgaggacacagcggactattattgttattatcaatccctcagtagtgctaagtacggccaagtcttctggggccaggggacccaggtcaccgtctcctca

SEQ ID NO: 3481 - DNA, 360 bp, synthetic construct
  source 1..360: mol_type = other DNA
gaggtgcagctggtggagtctgggggaggctcggtgcaggctggggggtctctgaggctctcctgtgcagcctctggaagcatcttcagtctcaatggcatgggctggtaccgccaggctccagggaagcagcgcgagttggtcgcaggaattcgtagtgatgggatggtaaattatggggactccgtgaagggccgattcaccatctccggagataacgccaagagcacggtgtatctgcagatgaacagcctgaaacctgaggacacagccgactattattgttattatcaatccctcagtagtgctacttacggccaagtcttctggggccaggggacccaggtcaccgtctcctca

SEQ ID NO: 3482 - DNA, 360 bp, synthetic construct
  source 1..360: mol_type = other DNA
gaggtgcagctggtggagtctgggggaggctcggtgcaggctggggggtctctgaggctctcctgtgcagcctctggaagcatcttcagtctcaatggcatgggctggtaccgccaggctccagggaagcagcgcgagttggtcgcaggaattcgtagtgatggtatggtaaattatggggactccgtgaagggccgattcaccatctccggagataacgccaagagcacggtgtatctgcagatgaacagcctgaaacctgaggacacagccgactattattgttattatcaatccctcaggagtgctaattacggccaagtcttctggggccaggggacccaggtcaccgtctcctca

SEQ ID NO: 3483 - DNA, 360 bp, synthetic construct
  source 1..360: mol_type = other DNA
gaggtgcagctggtggagtctgggggaggctcggtgcaggctggggggtctctgaggctctcctgtgcagcctctggaagcatcttcagtctcaatggcatgggctggtaccgccaggctccagggaagcagcgcgagttggtcgcaggaattcgtagtgatggactggtaaattatggggactccgtgaagggccgattcaccatctccggagataacgccaagagcacggtgtatctgcagatgaacagcctgaaacctgaggacacagccgactattattgttattatcaatccctcagtagtgctaattacggccgagtcttctggggccaggggacccaggtcaccgtctcctca

SEQ ID NO: 3484 - DNA, 360 bp, synthetic construct
  source 1..360: mol_type = other DNA
gaggtgcagctggtggagtctgggggaggctcggtgcaggctggggggtctctgaggctctcctgtgcagcctctggaagcatcttcagtctcaatggcatgggctggtaccgccaggctccagggaagcagcgcgagttggtcgcaggaattcgtagtgatggtatggtaaattatggggactccgtgaagggccgattcaccatctccggagataacgccaagagcactgtgtatctgcagatgaacagcctgaagcctgaggacacagccgactattattgttattatcaatccctcagtagtgctaattacggcaaagtcttctggggccaggggacccaggtcaccgtctcctca

SEQ ID NO: 3485 - DNA, 360 bp, synthetic construct
  source 1..360: mol_type = other DNA
gaggtgcagctggtggagtctgggggaggctcggtgcaggctggggggtctctgaggctctcctgtgcagcctctggaagcatcttcagtttcaatggcatgggctggtaccgccaggctccagggaagcagcgcgagttggtcgcaggaattcgtagtgatggtatggcaaattatggggactccgtgaggggccgattcaccatctccggagataacgccaagagcacggtgtatctgcagatgaacagcctgaaacctgaggacacagccgactattattgttattatcaatcctacagtagtgctaattacggccacgtcttctggggccaggggacccaggtcaccgtctcctca

SEQ ID NO: 3486 - DNA, 360 bp, synthetic construct
  source 1..360: mol_type = other DNA
gaggtgcagctggtggagtctgggggaggctcggtgcaggctggggggtctctgaggctctcctgtgcagcctctggaagcatcttcagtctcaatgccatgggctggtaccgccaggctccagggaagcagcgcgagttggtcgcaggaattcgtagtaatggtatggcgaattatggggactccgtgaagggccgattcaccatctccggagataacgccaagagcacggtgtatctgcagatgaacagcctgaaacctgaggacacagccgactattattgttattatcaatccttcagtagtgataattacggccatgttttctggggccaggggacccaggtcaccgtctcctca

SEQ ID NO: 3487 - DNA, 360 bp, synthetic construct
  source 1..360: mol_type = other DNA
gaggtgcagctggtggagtctgggggaggattggtgcaggctggggggtctctgagactctcttgtgtagcctctggagtcacattcaatattaatgccatgggctggtaccgccaatctcaagggaaggagcgcgagttggtcgcaggaattcgtagtgatggtatggcaaattatggggactccgtgaagggccgatacaccatctccggagataacgccaagagcacggtgtatctgcagatgaacagcctgaaacctgaggacacagccgactattattgttattatcaatcctacagtagtgctaattacggccacgtcttctggggccaggggacccaggtcaccgtctcctca

SEQ ID NO: 3488 - DNA, 360 bp, synthetic construct
  source 1..360: mol_type = other DNA
gaggtgcagctggtggagtctgggggaggctcggtgcaggctggggggtctctgaggctctcctgtgcagcctctggaagcatcttcagtctcaatggcatgggctggtaccgccaggctccagggaagcagcgcgagttggtcgcaggaattcgtagtaatgatatggcaaattatggggactccgtgaagggccgattcaccatctccggagataacgccaagagcacggtgtatctgcagatgaacagcctgaaacctgaggacacagccgactattattgttatgatcaatccctcagtagtgctaattacggccaagtcttctggggccaggggacccaggtcaccgtctcctca

SEQ ID NO: 3489 - DNA, 360 bp, synthetic construct
  source 1..360: mol_type = other DNA
gaggtgcagctggtggagtctgggggaggctcggtgcaggctggggggtctctgaggctctcctgtgcagcctctggaagcatctttagtctcaatggcatgggctggtaccgccaggctccagggaagcagcgcgagttggtcgcaggaattcgtagtaatgatatggcaaattatggggactccgtgaagggccgattcaccatctccggagataatgccaagagcacggtgtatctgcagatgaacagcctgaaacctgaggacacagccgactattattgttattatcaatccctccgtagtgctaattacggccaagtcttctggggccaggggacccaggtcaccgtctcctca

SEQ ID NO: 3490 - DNA, 360 bp, synthetic construct
  source 1..360: mol_type = other DNA
gaggtgcagctggtggagtctgggggaggctcggtgcaggctggggggtctctgaggctctcctgtgcagcctctggaagcatcttcagtctcaatggcatgggctggtaccgccaggctccagggaagcagcgcgagttggtcgcaggaattcgtagtgatggtatggcaaattatggggactccgtgaagggccgattcaccatctccggagataacgccaagagcacggtgtatctgcagatgaacagcctgaaacctgaggacacagccgactattattgttatcatcaatccctcagtagtgctaattacggccaagtcttctggggccaggggacccaggtcaccgtctcctca

SEQ ID NO: 3491 - DNA, 360 bp, synthetic construct
  source 1..360: mol_type = other DNA
gaggtgcagctggtggagtctgggggagacttggtgcaggctggggggtctctgagactctcctgtgcagcctctggaagcatcgtcagtaccaatggcatgggctggcaccgccaggttccagggaagggacgcgagttggtcgcaggtattcgtagtgatggatttacaaactatgcggactccgtgaagggccgattcaccatctccagcgataacgtcaagaacacggtgtatctgcagatgaacagcctgaaagctgaggacacagccgtctatttttgctattatcaatccctcactactcctaatttcggccaagtcttctggggccaggggacccaggtcaccgtctcctca

SEQ ID NO: 3492 - DNA, 360 bp, synthetic construct
  source 1..360: mol_type = other DNA
gaggtgcagctggtggagtctgggggaggcttggtgcagcctggggggtctctgaggctgtcctgtacagcctctggattccgttttggagactatgccatgggctggcaccgccaggttccagggaagcgacgcgagttggtcgcaggtattcgtagtgatggatttacaaactatgcggactccgtgaagggccgattcaccatctccagcgaggacgtcaaaaacacggtgtatctgcagatgaacagcctgaaagctgaggacacagccgtctatttttgctattatcaatccctcactactcctaattacggccaactcttctggggccaggggacccaggtcaccgtctcctca

SEQ ID NO: 3493 - DNA, 360 bp, synthetic construct
  source 1..360: mol_type = other DNA
gaggtgcagctggtggagtctgggggagacttggtgcaggctggggggtctctgagactctcctgtgcagcctctggaagcatcgtcagtaccaatggcatgggctggcaccgccaggttcctgggaagggacgcgagttggtcgcaggtattcgtagtgatggatttacaaactatgcggactccgtgaagggccgattcaccatctccagcgataacgtcaaggacacggtgtatctgcagatgaacagcctgaaagctgaggacacagccgtctatttttgctattatcaatccctcactactcctaatttcggccaagtcttctggggccaggggacccaggtcaccgtctcctca

SEQ ID NO: 3494 - DNA, 360 bp, synthetic construct
  source 1..360: mol_type = other DNA
gaggtgcagctggtggagtctgggggagacttggtgcaggctggggggtctctgagactctcctgtgcagcctctggaagcatcgtcagtaccagtgccatgggatggcaccgccaggttccagggaagcgacgcgagttggtcgcaggtattcgtagtgatggatttacaaacttagcggactccgtgaagggccgattcaccatctcccacgataacgtcaagaacacggcgtatctgcagatgaacagcctgaaagctgaggacacagccgtctatttttgtttttatcaatccctcagtactcctaatttcggccaaaccttctggggccaggggacccaggtcaccgtctcctca

SEQ ID NO: 3495 - DNA, 360 bp, synthetic construct
  source 1..360: mol_type = other DNA
gaggtgcagctggtggagtctgggggagacttggtgcaggctggggggtctctgagactctcctgtgcagcctctggaagcatcgtcagtaccaatgccatgggatggcaccgccaggttccagggaagggacgcgagttggtcgcaggctttcgtagtgatggatttacaaactatgcggactccgtgaagggccgattcaccatctccagcgataacgtcaagaacacggtgtatctgcagatgaacagcctgaaagctgaggacacagccgtctatttttgtttttatcaatccctcagtactcctaatttcggtcaaacgttctggggccaggggacccaggtcaccgtctcctca

SEQ ID NO: 3496 - DNA, 360 bp, synthetic construct
  source 1..360: mol_type = other DNA
gaggtgcagctggtggagtctgggggagacttggtgcaggctggggggtctctgagactctcctgtgcagcctctggaagcatcgtcagtaccaatggcatgggatggcaccgccaggttccagggaagggacgcgagttggtcgcaggtattcgtagtgatggatttacaaactatgcggactccgtgaagggccgattcaccatctccagcgataacgtcaagaacacggtgtatctgcagatgaacagcctgaaagctgaggacacagccgtctatttttgtttttatcaatccctcagtactcctaatttcggccaaacgatctggggccaggggacccaggtcaccgtctcctca

SEQ ID NO: 3497 - DNA, 360 bp, synthetic construct
  source 1..360: mol_type = other DNA
gaggtgcagctggtggagtctgggggagacttggtgcaggctggggggtctctgagactctcctgtgcagcctctggaagcatcgtcagtaccagtgccatgggatggcaccgccaggttccagggaagcgacgcgagttggtcgcaggtattcgtagtgatggatttacaaacttagcggactccgtgaagggccgattcaccatctcccacgataacgtcaagaacacggcgtatctgcagatgaacagcctgaaagctgaggacacagccgtctatttttgtttttatcaatccctcagtactcctaatttcggcaaaaccttctggggccaggggacccaggtcaccgtctcctca

SEQ ID NO: 3498 - DNA, 360 bp, synthetic construct
  source 1..360: mol_type = other DNA
gaggtgcagctggtggagtctgggggagacttggtgcaggctggggggtctctgagactctcctgtgcagcctctggaagcatcgtcagtaccaatgccatgggatggcaccgccaggttccagggaagggacgcgagttggtcgcaggctttcgtagtgatggatttacaaactatgcggactccgtgaagggccgattcaccatctccagcgataacgccaagaacacggtgtatctgcagatgaacagcctgaaagctgaggacacagccgtctatttttgtttttatcaatccctcagtactcctaatttcggtctaacgttctggggccaggggacccaggtcaccgtctcctca

SEQ ID NO: 3499 - DNA, 360 bp, synthetic construct
  source 1..360: mol_type = other DNA
gaggtgcagctggtggagtctgggggagacttggtgcaggctggggggtctctgagtctctcctgtgcagcctctggaagcatcgtcagtaccaatgccatgggctggcaccgccaggttccagggaagctgcgcgagttggtcgcaggtattcgtagtgatggatttacaaactatgcggactccgtgaagggccgattcaccatctccagcgatgacgtcaagaacacggtgtatctgcagatgaacagactgaaagctgaggacacagccgtctatttttgcttttatcaatccctcactactcctaatttcggccaagtcttctggggccaggggacccaggtcaccgtctcctca

SEQ ID NO: 3500 - DNA, 360 bp, synthetic construct
  source 1..360: mol_type = other DNA
gaggtgcagctggtggagtctgggggagacttggtgcaggctggggggtctctgagactctcctgtgcagcctctggaagcatcgtcagtaccaatgccatgggctggcaccgccaggttccagggaagcgacgcgagttggtcgcaggtattcgtagcgatggatttacaaactatgcggactccgtgaagggccgattcaccatctccagcgataacgtcaagaacacggtgtatctgcagatgaacagcctgaaacctgaggacacagccgtctatttttgcttttatcaatccctcacagctcctaatttcggccaagtcttcatgggccagggaacccaggtcaccgtctcctca

SEQ ID NO: 3501 - DNA, 360 bp, synthetic construct
  source 1..360: mol_type = other DNA
gaggtgcagctggtggagtctgggggagacttggtgcaggctggggggtctctgagactctcctgtgcagcctctggaagcatcgtcagtaccaatgccatgggatggcaccgccaggttccagggaagggacgcgagttggtcgcaggctttcgtagtgatggatttacaaactatgcggactccgtgaagggccgattcaccatctccagcgataacgtcaagaacacggtgtatctgcagatgaacagcctgaaagctgaggacacagccgtctatttttgtttttatcaatccctcagtactcctaatttcggtcacacgttctggggccaggggacccaggtcaccgtctcctca

SEQ ID NO: 3502 - DNA, 360 bp, synthetic construct
  source 1..360: mol_type = other DNA
gaggtgcagctggtggagtctgggggaggcttggtgcaggctggggggtctctgagactctcctgtgcagcctctggaagcatcgtcagtaccaacggcatgggctggcaccgccaggttccagggaagggacgcgagttggtcgcaggtattcgtagtgatggatttacaaactatgcggactccgtgaagggccgattcaccatctccagcgataacgtcaagaacacggtgtatctgcagatgaacagcctgaaagctgaggacacagccgtctatttttgctattatcaatccctcactactcctaatttcggccaagtcttctggggccaggggacccaggtcaccgtctcctca

SEQ ID NO: 3503 - DNA, 360 bp, synthetic construct
  source 1..360: mol_type = other DNA
gaggtgcagctggtggagtctgggggagacttggtgcaggctggggggtctcagagactctcctgtgcagcctctggaagcatcgtcagtaccaatgccatgggctggcaccgccaggttccagggaagcgacgcgagttggtcgcaggtattcgtagtgatggatttacaaactatgcggactccgtgaagggccgattcaccatctccagcgataacgtcaagaacacggtgtatctgcagatgaacagcctgaaacctgaggacacagccgtctatttttgcttttatcaatccctcacagctcctaatttcggccaagtcttcatgggccagggaacccaggtcaccgtctcctca

SEQ ID NO: 3504 - DNA, 360 bp, synthetic construct
  source 1..360: mol_type = other DNA
gaggtgcagctggtggagtctgggggagacttggtgcaggctggggggtctctgagactctcctgtgcagcctctggaagcatcgtcagtacgaatggcatgggatggcaccgccaggttccagggaagggacgcgagttggtcgcaggtattcgtagtgatggatttacaaactatgcggactccgtgaagggccgattcaccatctccagcgataacgtcaagaacacggtgtatctgcagatgaacagcctgaaacctgaggacacagccgtctatttttgcttttatcaatccctcacagctcctaatttcggccaagtcttcatgggccagggaacccaggtcaccgtctcctca

SEQ ID NO: 3505 - DNA, 360 bp, synthetic construct
  source 1..360: mol_type = other DNA
gaggtgcagctggtggagtctgggggagacttggtgcaggctggggggtctctgagactctcctgtgcagcctctggaagcatcgtcagtacgaatggcatgggatggcaccgccaggttccagggaagggccgcgagttggtcgcaggtattcgtagtgatggatttacaaactatgcggactccgtgaagggccgattcaccatctccagcgataacgtcaagaacacggtgtatctgcagatgaacagcctgaaagctgaggactcaggcgtctatttttgttattatcaatccctcagtactcctaatttcggtcaaacgttctggggccaggggacccaggtcaccgtctcctca

SEQ ID NO: 3506 - DNA, 360 bp, synthetic construct
  source 1..360: mol_type = other DNA
gaggtgcagctggtggagtctgggggagacttggtgcaggctggggggtctctgaggctctcctgtgcagcctctggaagcatcgtcagtaccaatagcatgggctggcaccgccaggttccagggaaccgacgcgaaatggtcgcaggtattcgtagtgatggattcataaactatgcggactccgtgaagggccgattcaccatctccagcgataacgtcaacaacacggtgtatctgcagatgaacagcctgaaacctgaggacacagccgtctatttgtgtttttatcattccctcagtactcctaattttggccaactcttctggggccaggggacccaggtcaccgtctcctca

SEQ ID NO: 3507 - DNA, 360 bp, synthetic construct
  source 1..360: mol_type = other DNA
gaggtgcagctggtggagtctgggggagacttggtgcaggctggggggtctctgagactctcctgtgcagcctctggaagcatcgtcggtaccaatgccatgggatggcaccgccaggttccagggaagggacgcgagttggtcgcaggctttcgtagtgatggatttacaaactatgcggactccgtgaagggccgattcaccatctccagcgataacgtcaagaacacggtgtatctgcagatgaacagcctgaaagctgaggacacagccgtctatttttgtttttatcaatccctcagtactcctaacttcggtcgaacgttctggggccaggggacccaggtcaccgtctcctca

SEQ ID NO: 3508 - DNA, 360 bp, synthetic construct
  source 1..360: mol_type = other DNA
gaggtgcagctggtggagtctgggggagacttggtgcaggctggggggtctctgagactctcctgtgcagcctctggaagcatcgtcagtaccaataacatgggctggcaccgccaggttccagggaagggacgcgagttggtcgcaggtattcgtagtgatggattcataaactatgcggactccgtgaagggccgattcaccatctccagcgataacgtcaacaacacggtgtatctgcagatgaacagcctgaaacctgaggacacagccgtctattcgtgtttttatcaatccctcagtactcctaatttcggccaactctccttgggccaggggacccaggtcaccgtctcctca

SEQ ID NO: 3509 - DNA, 360 bp, synthetic construct
  source 1..360: mol_type = other DNA
gaggtgcagctggtggagtctgggggagacttggtgcaggctggggggtctctgagactctcctgtgcagcctctggaagcatcgtcagtaccaatgccatgggatggcaccgccaggttccagggaagggacgcgagttggtcgcaggctttcgtagtgatggatttacaaactatgcggactccgtgaagggccgattcaccatctccagcgataacgtcaagaacacggtgtatctgcagatgaacagcttgaaagctgaggacacagccgtctatttttgtttttatcaacccctcagtactcctaatttcggtcaaacgttctggggccaggggacccaggtcaccgtctcctca

SEQ ID NO: 3510 - DNA, 360 bp, synthetic construct
  source 1..360: mol_type = other DNA
gaggtgcagctggtggagtctgggggagacttggtgcaggctggggggtctctgagactctcctgtgcagcctctggaagcatcgtcagtaccaatgccatgggatggcaccgccaggttccagggaagggacgcgagttggtcgcaggctttcgtagtgatggatttacaaactatgcggactccgtgaagggccgattcaccatctccagcgataacgtcaagaacacggtgtatctgcagatgaacagcctgaaagctgaggacacagccgtctatttttgtttttatcactccctcagtactcctaatttcggtcaaacgttctggggccaggggacccaggtcaccgtctcctca

SEQ ID NO: 3511 - DNA, 360 bp, synthetic construct
  source 1..360: mol_type = other DNA
gaggtgcagctggtggagtctgggggagacttggtgcaggctggggggtctctgagactctcctgtgcagcctctggaagcatcgtcagtaccaatgccatgggatggcaccgccaggttccagggaagggacgcgagttggtcgcaggctttcgtagtgatggatttacaaactatgcggactccgtgaagggccgattcaccatctccagcgataacgtcaagaacacggtgtatctgcagatgaacagcctgaaagctgaggacacagccgtctatttttgtttttatcaatccctcaggactcctaatttcggtcaaacgttctggggccaggggacccaggtcaccgtctcctca

SEQ ID NO: 3512 - DNA, 360 bp, synthetic construct
  source 1..360: mol_type = other DNA
gaggtgcagctggtggagtctgggggagacttggtgcaggctggggggtctctgagactctcctgtgcagcctctggaagcatcgtcagtaccaatgccatgggatggcaccgccaggttccagggaagggacgcgagttggtcgcaggctttcgtagtgatggatttacaaactatgcggactccgtgaagggccgattcaccatctccagcgataacgtcaagaacacggtgtatctgcagatgaacagcctgaaagctgaggacacagccgtctatttttgtttttctcaatccctcagtactcctaatttcggtcaaacgttctggggccaggggacccaggtcaccgtctcctca

SEQ ID NO: 3513 - DNA, 360 bp, synthetic construct
  source 1..360: mol_type = other DNA
gaggtgcagctggtggagtctgggggagacttggtgcaggctggggggtctctgagactctcctgtgcagcctctggaagcatcgtcagtaccaatgccatgggatggcaccgccaggttccagggaagggacgcgagttggtcgcaggctttcgtagtgatggatttacaaactatgcggactccgtgaagggccgattcaccatctccagcgataacgtcaagaacacggtgtatctgcagatgaacagcctgaaagctgaggacacagccgtctatttttgttcttatcaatccctcagtactcctaatttcggtcaaacgttctggggccaggggacccaggtcaccgtctcctca

SEQ ID NO: 3514 - DNA, 360 bp, synthetic construct
  source 1..360: mol_type = other DNA
gaggtgcagctggtggagtctgggggagacttggtgcaggctggggggtccctgaggctctcctgtgcagcctctggaagcatcgtcagtaccaatagcatgggctggcaccgccaggttccagggaaccgacgcgaaatggtcgcaggtattcgtagtgatggattcataaactatgcggactccgtgaagggccgattcaccatctccagcgataacgtcaacaacacggtgtatctgcagatgaacagcctgaaacctgaggacacagccgtctatttgtgtttttatcaatccctcagtactcctaattttggccaactcgtctggggccaggggacccaggtcaccgtctcctca

SEQ ID NO: 3515 - DNA, 360 bp, synthetic construct
  source 1..360: mol_type = other DNA
gaggtgcagctggtggagtctgggggagacttggtgcaggctggggggtctctgagactctcctgtgcagcctctggaagcatcgtcagtaccaataacatgggctggcaccgccaggttccagggaagggacgcgagttggtcgcaggtattcgtagtgatggattcataaactatgcggactccgtgaagggccgattcaccatctccagcgataacgtcaacaacacggtgtatctgcagatgaacagcctgaaacctgaggacacagccgtctattcgtgtttttatcactccctcagtactcctaatttcggccaactcttcttgggccaggggacccaggtcaccgtctcctca

SEQ ID NO: 3516 - DNA, 360 bp, synthetic construct
  source 1..360: mol_type = other DNA
gaggtgcagctggtggagtctgggggagacttggtgcaggctggggggtctctgagtctctcctgtgcagcctctggaagcatcgtcagtaccaatgccatgggctggcaccgccaggttccagggaagctgcgcgagttggtcgcaggtattcgtagtgatggatttacaaactatgcggactccgtgaagggccgattcaccatctccagcgatgacgtcaagaacacggtgtatctgcagatgaacagactgaaagctgaggacacagccgtctatttttgcttttatcaatccctcactactcctaatttcggccaactcttctggggccaggggacccaggtcaccgtctcctca

SEQ ID NO: 3517 - DNA, 360 bp, synthetic construct
  source 1..360: mol_type = other DNA
gaggtgcagctggtggagtctgggggagacttggtgcaggctggggggtctctgagactctcctgtgcagcctctggaagcatcgtcagtaccaatgccatgggatggcaccgccaggttccagggaagggacgcgagttggtcgcaggctttcgtagtgatggatttacaaactatgcggactccgtgaagggccgattcaccatctccagcgataacgtcaagaacacggtgtatctgcagatgaacagcctgaaagctgaggacacagccgtctatttttgttttgatcaatccctcagtactcctaatttcggtcaaacgttctggggccaggggacccaggtcaccgtctcctca

SEQ ID NO: 3518 - DNA, 360 bp, synthetic construct
  source 1..360: mol_type = other DNA
gaggtgcagctggtggagtctgggggagacttggtgcaggctggggggtctctgagactctcctgtgcagcctctggaagcatcgtcagtaccaatgccatgggatggcaccgccaggttccagggaagggacgcgagttggtcgcaggctttcgtagtgatggatttacaaactatgcggactccgtgaagggccgattcaccatctccagcgataacgtcaagaacacggtgtatctgcagatgaacagcctgaaagctgaggacacagccgtctatttttgtttttatcaatcccacagtactcctaatttcggtcaaacgttctggggccaggggacccaggtcaccgtctcctca

SEQ ID NO: 3519 - DNA, 360 bp, synthetic construct
  source 1..360: mol_type = other DNA
gaggtgcagctggtggagtctgggggagacttggtgcaggctggggggtctctgagactctcctgtgcagcctctggaagcatcgtcagtaccaatgccatgggatggcaccgccaggttccagggaagggacgcgagttggtcgcaggctttcgtagtgatggatttacaaactatgcggactccgtgaagggccgattcaccatctccagcgataacgtcaagaacacggtgtatctgcagatgaacagcctgaaagctgaggacacagccgtctatttttgtttttatcaatccatcagtactcctaatttcggtcaaacgttctggggccaggggacccaggtcaccgtctcctca

SEQ ID NO: 3520 - DNA, 360 bp, synthetic construct
  source 1..360: mol_type = other DNA
gaggtgcagctggtggagtctgggggagacttggtgcaggctggggggtctctgagactctcctgtgcagcctctggaagcatcgtcagtaccaatgccatgggatggcaccgccaggttccagggaagggacgcgagttggtcgcaggctttcgtagtgatggatttacaaactatgcggactccgtgaagggccgattcaccatctccagcgataacgtcaagaacacggtgtatctgcagatgaacagcctgaaagctgaggacacagccgtctatttttgtttgtatcaatccctcagtactcctaatttcggtcaaacgttctggggccaggggacccaggtcaccgtctcctca

SEQ ID NO: 3521 - DNA, 360 bp, synthetic construct
  source 1..360: mol_type = other DNA
gaggtgcagctggtggagtctgggggagacttggtgcaggctggggggtctctgagactctcctgtgcagcctctggaagcatcgtcagtaccaatgccatgggctggcaccgccaggttccagggaagggacgcgagttggtcgcaggctttcgtagtgatggatttacaaactatgcggactccgtgaagggccgattcaccatctccagcgataacgtcaagaacacggtgtatctgcagatgaacagcctgaaagctgaggacacagccgtctatttttgtttttatcaatccctcagtactcataatttcggtcaaacgttctggggccaggggacccaggtcaccgtctcctca

SEQ ID NO: 3522 - DNA, 360 bp, synthetic construct
  source 1..360: mol_type = other DNA
gaggtgcagctggtggagtctgggggagacttggtgcaggctggggggtctctgaggctctcctgtgcagcctctggaagcatcgtcagtaccaatagcatgggctggcaccgccaggttccagggaaccgacgcgaaatggtcgcaggtattcgtagtgatggattcataaactatgcggactccgtgaagggccgattcaccatctccagcgataacgtcaacaacacggtgtatctgcagatgaacagcctgaaacctgaggacacagccgtctatttgtgtttttatcaatccctcagtgctcctaattttggccaactcttctggggccaggggacccaggtcaccgtctcctca

SEQ ID NO: 3523 - DNA, 360 bp, synthetic construct
  source 1..360: mol_type = other DNA
gaggtgcagctggtggagtctgggggagacttggtgcaggctggggggtctctgaggctctcctgtgcagcctctggaagcatcgtcagtaccaatagcatgggctggcaccgccaggttccagggaaccgacgcgaaatggtcgcaggtattcgtagtgatggattcataaactatgcggactccgtgaagggccgattcaccatctccagcgataacgtcaacaacacggtgtatctgcagatgaacagcctgaaacctgaggacacagccgtctatttgtgtttttatcaatccctcagtactcctaattttggccacctcttctggggccaggggacccaggtcaccgtctcctca

SEQ ID NO: 3524 - DNA, 360 bp, synthetic construct
  source 1..360: mol_type = other DNA
gaggtgcagctggtggagtctgggggagacttggtgcaggctggggggtctctgagactctcctgtgcagcctctggaagcatcgtcagtaccaataacatgggctggcaccgccaggttccagggaagggacgcgagttggtcgcaggtattcgtagtgatggattcataaactatgcggactccgtgaagggccgattcaccatctccagcgataacgtcaacaacacggtgtatctgcagatgaacagcctgaaacctgaggacacagccgtctattcgtgttcttatcaatccctcagtactcctaatttcggccaactcttcttgggccaggggacccaggtcaccgtctcctca

SEQ ID NO: 3525 - DNA, 360 bp, synthetic construct
  source 1..360: mol_type = other DNA
gaggtgcagctggtggagtctgggggagacttggtgcaggctggggggtctctgagtctctcctgtgcagcctctggaagcatcgtcagtaccaatgccatgggttggcaccgccaggttccagggaagctgcgcgagttggtcgcaggtattcgtagtgatggatttacaaactatgcggactccgtgaagggccgattcaccatctccagcgatgacgtcaagaacacggtgtatctgcagatgaacagactgaaagctgaggacacagccgtctatttttgcttttatcactccctcactactcctaatttcggccaagtcttctggggccaggggacccaggtcaccgtctcctca

SEQ ID NO: 3526 - DNA, 360 bp, synthetic construct
  source 1..360: mol_type = other DNA
gaggtgcagctggtggagtctgggggagacttggtgcaggctggggggtctctgagactctcctgtgcagcctctggaagcatcgtcagtaccaatgccatgggctggcaccgccaggttccagggaagcgacgcgagttggtcgcaggtattcgtagtgatggatttacaaactatgcggactccgtgaagggccgattcaccatctccagcgaggacgtcaaaaacacggtgtatctgcagatgaacagcctgaaagctgaggacacagccgtctatttttgctattatcaatccctcactactcctaattacggccaactcttctggggccaggggacccaggtcaccgtctcctca

SEQ ID NO: 3527 - DNA, 360 bp, synthetic construct
  source 1..360: mol_type = other DNA
gaggtgcagctggtggagtctgggggagacttggtgcaggctggggggtctctgagactctcctgtgcagcctctggaagcatcgtcagtaccaatgccatgggatggcaccgccaggttccagggaagggacgcgagttggtcgcaggctttcgtagtgatggatttacaaactatgcggactccgtgaagggccgattcaccatctccagcgataacgtcaagaacacggtgtatctgcagatgaacagcctgagagctgaggacacagccgtctatttttgtttttatcaatccctcagtactcctaatttcgatcaaacgttctggggccaggggacccaggtcaccgtctcctca

SEQ ID NO: 3528 - DNA, 360 bp, synthetic construct
  source 1..360: mol_type = other DNA
gaggtgcagctggtggagtctgggggagacttggtgcaggctggggggtctctgagactctcctgtgcagcctctggaagcatcgtcagtaccaatgccatgggatggcaccgccaggttccagggaagggacgcgagttggtcgcaggctttcgtagtgatggatttacaaactatgcggactccgtgaagggccgattcaccatctccagcgataacgtcaagaacacggtgtatctgcagatgaacagcctgaaagctgaggacacagccgtctatttttgtatttatcaatccctcagtactcctaatttcggtcaaacgttctggggccaggggacccaggtcaccgtctcctca

SEQ ID NO: 3529 - DNA, 360 bp, synthetic construct
  source 1..360: mol_type = other DNA
gaggtgcagctggtggagtctgggggagacttggtgcaggctggggggtctctgagactctcctgtgcagcctctggaagcatcgtcagtacgaatggcatgggatggcaccgccaggttccagggaagggccgcgagttggtcgcaggtattcgtagtgatggatttacaaactatgcggactccgtgaagggccgattcaccatctccagcgataacgtcaagaacacggtgtatctgcagatgaacagcctgaaagctgaggactcaggcgtctatttttgttattatcaatccctcagtactcctaattttggccaactcttctggggccaggggacccaggtcaccgtctcctca

SEQ ID NO: 3530 - DNA, 360 bp, synthetic construct
  source 1..360: mol_type = other DNA
gaggtgcagctggtggagtctgggggagacttggtgcaggctggggggtctctgagtctctcctgtgcagcctctggaagcatcgtcggtaccaatgccatgggctggcaccgccaggttccagggaagctgcgcgagttggtcgcaggtattcgtagtgatggatttacaaactatgcggactccgtgaagggccgattcaccatctccagcgatgacgtcaagaacacggtgtatctgcagatgaacagactgaaagctgaggacacagccgtctatttttgcttttatcaatccctcactactcctaatttcggccaactcttctggggccaggggacccaggtcaccgtctcctca

SEQ ID NO: 3531 - DNA, 360 bp, synthetic construct
  source 1..360: mol_type = other DNA
gaggtgcagctggtggagtctgggggagacttggtgcaggctggggggtctctgagactctcctgtgcagcctctggaagcatcgtcagtaccaatgccatgggctggcaccgccaggttccagggaagcgacgcgagttggtcgcaggtattcgtagtgatggatttacaaactatgcggactccgtgaaggaccgattcaccatctccagcgaggacgtcaaaaacacggtgtatctgcagatgaacagcctgaaagctgaggacacagccgtctatttttgctattatcaatccctcactactcctaattacggccaactcttctggggccaggggacccaggtcaccgtctcctca

SEQ ID NO: 3532 - DNA, 360 bp, synthetic construct
  source 1..360: mol_type = other DNA
gaggtgcagctggtggagtctgggggagacttggtgcaggctggggggtctctgagtctctcctgtgcagcctctggaagcatcgtcagtaccaatgccatgggctggcaccgccaggttccagggaagctgcgcgagttggtcgcaggtattcgtagtgatggatttgcaaactatgcggactccgtgaagggccgattcaccatctccagcgatgacgtcaagaacacggtgtatctgcagatgaacagactgaaagctgaggacacagccgtctatttttgcttttatcaatccctcactactcctaatttcggccaactcttctggggccaggggacccaggtcaccgtctcctca

SEQ ID NO: 3533 - DNA, 360 bp, synthetic construct
  source 1..360: mol_type = other DNA
gaggtgcagctggtggagtctgggggaggcttggtgcaggctggggggtctctgagactctcctgtgcagcctctggaagcatcgtcagtaccaatgccatgggctggcaccgccaggttccagggaagcgacgcgagttggtcgcaggtattcgtagtgatggatttacaaactatgcggactccgtgaagggccgattcaccatctccagcgaggacgtcaaaaacacggtgtatctgcagatgaacagcctgaaagctgaggacacagccgtctatttttgctattatcaatccctcactactcctaattacggccaactcttctggggccaggggacccaggtcaccgtctcctca

SEQ ID NO: 3534 - DNA, 360 bp, synthetic construct
  source 1..360: mol_type = other DNA
gaggtgcagctggtggagtctgggggaggcttggtgcaggctggagggtctctgagtctctcctgtgcagcctctggaagcatcgtcagtaccaatgccatgggctggcaccgccaggttccagggaagctgcgcgagttggtcgcaggtattcgtagtgatggatttacaaactatgcggactccgtgaagggccgattcaccatctccagcgatgacgtcaagaacacggtgtatctgcagatgaacagactgaaagctgaggacacagccgtctatttttgcttttatcaatccctcactactcctaatttcggccaactcttctggggccaggggacccaggtcaccgtctcctca

SEQ ID NO: 3535 - DNA, 360 bp, synthetic construct
  source 1..360: mol_type = other DNA
gaggtgcagctggtggagtctgggggagacttggtgcaggctggggggtctctgagactctcctgtgcagcctctggaagcatcgtcagtaccaatgccatgggatggcaccgccaggttccagggaagggacgcgagttggtcgcaggctttcgtagtgatggatttacaaactatgcggactccgtgaagggccgattcaccatctccagcgataacgtcaagaacacggtgtatctgcagatgaacagcctgaaagctgaggacacagccgtctatttttgtttttataaatccctcagtactcctaatttcggtcaaacgttctggggccaggggacccaggtcaccgtctcctca

SEQ ID NO: 3536 - DNA, 360 bp, synthetic construct
  source 1..360: mol_type = other DNA
gaggtgcagctggtggagtctgggggagacttggtgcaggctggggggtctctgagactctcctgtgcagcctctggaagcatcgtcagtaccaatggcatgggctggcaccgccaggttccagggaagggacgcgagttggtcgcaggtattcgtagtgatggatttacaagctatgcggactccgtgaagggccgattcaccatctccagcgataacgtcaagaacacggtgtatctgcagatgaacagcctgaaagctgaggacacagccgtctatttttgctattatcaatccctcactactcctaatttcggccaagtcttctggggccaggggacccaggtcaccgtctcctca

SEQ ID NO: 3537 - DNA, 360 bp, synthetic construct
  source 1..360: mol_type = other DNA
gaggtgcagctggtggagtctgggggagacttggtgcaggctggggggtctctgagactctcctgtgcagcctctggaagcatcgtcagtaccaatggcatgggctggcaccgccaggttccagggaagggacgcgagttggtcgcaggtattcgtagtgatggatttacaaactatgcggactccgtgaagggccgattcaccatctccagcgataacgtcaagaacacggtgtatctgcagatgaacagcctgaaagctgaggacacagccgtctatttttgctatcatcaatccctcactactcctaatttcggccaagtcttctggggccaggggacccaggtcaccgtctcctca

SEQ ID NO: 3538 - DNA, 360 bp, synthetic construct
  source 1..360: mol_type = other DNA
gaggtgcagctggtggagtctgggggagacttggtgcaggctggggggtctctgaggctctcctgtgcagcctctggaagcatcgtcagtaccaatagcatgggctggcaccgccaggttccagggaaccgacgcgaaatggtcgcaggtattcgtagtgatggattcataaactatgcggactccgtgaagggccgactcaccatctccagcgataacgtcaacaacacggtgtatctgcagatgaacagcctgaaacctgaggacacagccgtctatttgtgtttttatcaatccctcggtactcctaattttggccaactcttctggggccaggggacccaggtcaccgtctcctca

SEQ ID NO: 3539 - DNA, 360 bp, synthetic construct
  source 1..360: mol_type = other DNA
gaggtgcagctggtggagtctgggggagacttggtgcaggctggggggtctctgaggctctcctgtgcagcctctggaagcatcgtcagtaccaatagcatgggctggcaccgccaggttccagggaaccgacgcgaaatggtcgcaggtattcgtagtgatggattcataaactatgcggactccgtgaagggccgattcaccatctccagcgataacgtcaacaacacggtgtatctgcagatgaacagcctgaagcctgaggacacagccgtctatttgtgtttttatcaacccctcagtacacctaattttggccaactcttctggggccaggggacccaggtcaccgtctcctca

SEQ ID NO: 3540 - DNA, 360 bp, synthetic construct
  source 1..360: mol_type = other DNA
gaggtgcagctggtggagtctgggggagacttggtgcaggctggggggtctctgaggctctcctgtgcagcctctggaagcatcgtcagtaccaatagcatgggctggcaccgccaggttccagggaaccgacgcgaaatggtcgcaggtattcgtagtgatggattcataaactatgcggactccgtgaagggccgattcaccatctccagcgataacgtcaacaacacggtgtatctgcagatggacagcctgaaacctgaggacacagccgtctatttgtgtttttatcaacccctcagtactcctaattttggccaactcttctggggccaggggacccaggtcaccgtctcctca

SEQ ID NO: 3541 - DNA, 360 bp, synthetic construct
  source 1..360: mol_type = other DNA
gaggtgcagctggtggagtctgggggagacttggtgcaggctggggggtctctgaggctctcctgtgcagcctctgggagcatcgtcagtaccaatagcatgggctggcaccgccaggttccagggaaccgacgcgaaatggtcgcaggtattcgtagtgatggattcataaactatgcggactccgtgaagggccgattcaccatctccagcgataacgtcaacaacacggtgtatctgcagatgaacagcctgaaacctgaggacacagccgtctatttgtgtttttatcaatccctcagtactcctaattttggcctactcttctggggccaggggacccaggtcaccgtctcctca

SEQ ID NO: 3542 - DNA, 360 bp, synthetic construct
  source 1..360: mol_type = other DNA
gaggtgcagctggtggagtctgggggaggctcggtgcaggctggggggtctctgaggctctcctgtgcagcctctggaagcatcttcagtctcaatggcatgggctggtaccgccaggctccagggaagcagcgcgagttggtcgcaggaattcgtagtgatggactggtaaattatggggactccgtgaagggccgattcaccatctccggagataacgccaagagcactgtgtatctgcagatgaacggcctgaaacctgaggacacagccgactatgattgttattatcaatccctcagtactcctaatttcggtcaaacgttctggggccaggggacccaggtcaccgtctcctca

SEQ ID NO: 3543 - DNA, 360 bp, synthetic construct
  source 1..360: mol_type = other DNA
gaggtgcagctggtggagtctgggggaggctcggtgcaggctggggggtctctgaggctctcctgtgcagcctctggaagcatcttcagtttcaatggcatgggctggtaccgccaggctccagggaacacgcgcgagttggtcgcaggaatccgtagcgatggtatggcaaattatggggactccgtgaagggccgattcaccatctccggagataacgccaagagcacggtgtatctgcagatgaacagcctgaaacctgaggacacagccgactattattgttattatcaatccctcagtagtgctaatttcggccaactcttctggggccaggggacccaggtcaccgtctcctca

SEQ ID NO: 3544 - DNA, 360 bp, synthetic construct
  source 1..360: mol_type = other DNA
gaggtgcagctggtggagtctgggggaggctcggtgcaggctggggggtctctgaggctctcctgtgcagcctctggaagcatctccagtttcaatggcatgggctggtaccgccaggctccagggaagcagcgcgagttggtcgcaggaattcgtagtgatggtatggaaaattatggggactccgtgaagggccgattcaccatctccggagataacgccaagagcacggtgtatctgcagatgaacagcctgaaacctgaggacacagccgactattattgttattatcaatccctcagtagtgctaattttggccaactcttctggggccaggggacccaggtcaccgtctcctca

SEQ ID NO: 3545 - DNA, 360 bp, synthetic construct
  source 1..360: mol_type = other DNA
gaggtgcagctggtggagtctgggggaggctcggtgcaggctggggggtctctgaggctctcctgtgcagcctctggaagcatcttcagtctcaatggcatgggctggtaccgccaggctccagggaagcagcgcgagttggtcgcaggaattcgtagtgatggactggtaaattatggggactccgtgaagggccgattcaccatctccggagataacgccaagagcactgtgtatctgcagatgaacggcctgaaacctgaggacacagccgactatgattgttattatcaatccttcagtagtgctaatttcggccaaacgatctggggccaggggacccaggtcaccgtctcctca

SEQ ID NO: 3546 - DNA, 360 bp, synthetic construct
  source 1..360: mol_type = other DNA
gaggtgcagctggtggagtctgggggaggctcggtgcaggctggggggtctctgaggctctcctgtgcagcctctggaagcatctccagtttcaatggcatgggctggtaccgccaggctccagggaagcagcgcgagttggtcgcaggaattcgtagtgatggtatggaaaattatggggactccgtgaagggcggattcaccatctccggagataacgccaagagcacggtgtatctgcagatgaacagcctgaaacctgaggacacagccgactattattgttattatcaatccctcggtagtgctaattttggccaactcttctggggccaggggacccaggtcaccgtctcctca

SEQ ID NO: 3547 - DNA, 360 bp, synthetic construct
  source 1..360: mol_type = other DNA
gaggtgcagctggtggagtctgggggaggcttggtgcaggctggggggtctctgagactctcctgtgcagcctctggaagcatccgcaatatcaatggcatgggctggtaccgccaggctccagggaagcagcgcgagttggtcgcgggtattcgtagtaacagtgaaccaaactatgcggactccgtgaagggccgattcaccatctccagagataatgccaagaacgcggtgtatctgcagatgaacagcctgaaacctgaggacacagccgtctattactgttattatcaatccctcagtagtgttaattggggccaagtcttctggggccaggggacccaggtcaccgtctcctca

SEQ ID NO: 3548 - DNA, 360 bp, synthetic construct
  source 1..360: mol_type = other DNA
gaggtgcagctggtggagtctgggggaggctcggtgcaggctggggggtctctgaggctctcctgtgcagcctctggaagcatcttcagtttcaatgccatgggctggtaccgccaggctccagggaagcagcgcgagttggtcgcaggaattcgtagtaatggtatggcaaattatggggactccgtgaagggccgattcaccatctccggagataacgccaagagcacggtgtatctgcagatgaacagcctgaaacctgaggacacagccgactattattgttattatcaatccctcggtagtgctaattacggccaactcttctggggccaggggacccaggtcaccgtctcctca

SEQ ID NO: 3549 - DNA, 360 bp, synthetic construct
  source 1..360: mol_type = other DNA
gaggtgcagctggtggagtctgggggaggctcggtgcaggctggggggtctctgaggctctcctgtgcagcctctggaagcatcttcagtttcaatgccatgggctggtaccgccaggctccagggaagcagcgcgagttggtcgcaggaattcgtagtaatggtatggcaaattatggggactccgtgaagggccgattcaccatctccggagataacgccaagagcacggtgtatctgcagatgaacagcctgaaacctgaggacacagccgactattattgttattatcactccctcagtagtgctaattacggccaactcttctggggccaggggacccaggtcaccgtctcctca

SEQ ID NO: 3550 - DNA, 360 bp, synthetic construct
  source 1..360: mol_type = other DNA
gaggtgcagctggtggagtctgggggaggctcggtgcaggctggggggtctctgaggctctcctgtgcagcctctggaagcatcttcagtttcaatgccatgggctggtaccgccaggctccagggaagcagcgcgagttggtcgcaggaattcgtagtaatggtatggcaaattatggggactccgtgaagggccgattcaccatctccggagataacgccaagagcacggtgtatctgcagatgaacagcctgaaacctgaggacacagccgactattattgttattatcaatccctcagtggtgctaattacggccaactcttctggggccaggggacccaggtcaccgtctcctca

SEQ ID NO: 3551 - DNA, 360 bp, synthetic construct
  source 1..360: mol_type = other DNA
gaggtgcagctggtggagtctgggggagacttggtgcaggctggggggtctctgagactctcctgtgcagcctctggaagcatcgtcagtacgaatggcatgggatggcaccgccaggttccagggaagggccgcgagttggtcgcaggtattcgtagtgatggatttacaaactatgcggactccgtgaagggccgattcaccatctccagcgataacgtcaagaacacggtgtatctgcagatgaacagcctgaaagctgaggactcaggcgtctatttttgttattatcaagccctcagtagtgctaattacggccaactcttctggggccaggggacccaggtcaccgtctcctca

SEQ ID NO: 3552 - DNA, 360 bp, synthetic construct
  source 1..360: mol_type = other DNA
gaggtgcagctggtggagtctgggggagacttggtgcaggctggggggtctctgagactctcctgtgcagcctctggaagcatcgtcagtaccaatagcatgggctggcaccgccaggttccagggaagcgacgcgagttggtcgcaggtattcgtagtgatggattcataaactatgcggactccgtgaagggccgattcaccatctccagcgataacgtcaacaacacggtgtatctgcagatgaacagcctgaaacctgaggacacagccgtctatttgtgtttttatcaatccctcagtagtgctaattacggccaactcttctggggccaggggacccaggtcaccgtctcctca

SEQ ID NO: 3553 - DNA, 360 bp, synthetic construct
  source 1..360: mol_type = other DNA
gaggtgcagctggtggagtctgggggaggctcggtgcaggctggggggtctctgaggctctcctgtgcagcctctggaagcatcttcagtttcaatgccatgggctggtaccgccaggctccagggaagcagcgcgagttggtcgcaggaattcgtagtaatggtatggcaaattatggggactccgtgaagggccgattcaccatctccggagataacgccaagagcacggtgtatctgcagatgaacagcctgaaacctgaggacacagccgactattattgttatgatcaatccctcagtagtgctaattacggccaactcttctggggccaggggacccaggtcaccgtctcctca

SEQ ID NO: 3554 - DNA, 360 bp, synthetic construct
  source 1..360: mol_type = other DNA
gaggtgcagctggtggagtctgggggaggcttggtgcaggctggggggtctctgagagtctcctgtgcagcctctggaagcatcttcagggccgatgccatgggctggcaccgccaggttccagggaagccgcgcgagtttgtcgcgggtattcgtagtgatggatttaccaactatgcggaggccgtgaagggccgattcaccatctcctgggataccgtcaagaacacggtgtatctgcagatgaacagcctgaaacctgaggacacagccgtctatacttgttattatcaatccctcagtagtcctaatttcggtcaaacgttctggggccaggggacccaggtcaccgtctcctca

SEQ ID NO: 3555 - DNA, 360 bp, synthetic construct
  source 1..360: mol_type = other DNA
gaggtgcagctggtggagtctgggggaggcttggtgcaggctggggggtctctgagagtctcctgtgcagcctctggaagcatcttcagggccgatgccatgggctggcaccgccaggttccagggaagccgcgcgagtttgtcgcgggtattcgtagtgatggatttaccaactatgcggaggccgtgaagggccgattcaccatctcctgggataccgtcaagaacacggtgtatctgcagatgaacagcctgaaacctgaggacacagccgtctacacttgttattatcaatccctcagtagtcctaatttcggccaaacgatctggggccaggggacccaggtcaccgtctcctca

SEQ ID NO: 3556 - DNA, 360 bp, synthetic construct
  source 1..360: mol_type = other DNA
gaggtgcagctggtggagtctgggggaggctcggtgcaggctggggggtctctgaggctctcctgtgcagcctctggaagcatcttcagtctcaatggcatgggctggtaccgccaggctccagggaagcagcgcgagttggtcgcaggaattcgtagtgatggactggtaaattatggggactccgtgaagggccgattcaccatctccggagataacgccaagagcactgtgtatctgcagatgaacggccttaaacctgaggacacagccgactatgattgttattatcaatccttcagtagtgctaatttcggccaaaccttctggggccaggggacccaggtcaccgtctcctca

SEQ ID NO: 3557 - DNA, 360 bp, synthetic construct
  source 1..360: mol_type = other DNA
gaggtgcagctggtggagtctgggggaggctcggtgcaggctggggggtctctgaggctctcctgtgcagcctctggaagcatcttcagtttcaatgccatgggctggtaccgccaggctccagggaagcagcgcgagttggtcgcaggaattcgtagtaatggtatggcaaattatggggactccgtgaagggccgattcaccatctccggagataacgccaagagcacggtgtacctgcagatgaacagcctgaaacctgaggacacagccgactattattgttattatcaatccctcagtagtgctaattacggccaactcttctggggccaggggacccaggtcaccgtctcctca

SEQ ID NO: 3558 - DNA, 360 bp, synthetic construct
  source 1..360: mol_type = other DNA
gaggtgcagctggtggagtctgggggaggcttggtgcaggctggggggtctctgagactctcctgtgcagcctctggaagcatcttcagtggcaatgcaatgggctggtaccgccaggctccagggaagcagcgcgagttggtcgcaggtattcatagtaatggtataacaaactatgcggactccgtgaagggccgattcaccatctccagagataacgtcaagaacacggtgtatctgcagatgaacagcctgaaacctgaggacacagccgtctattactgttattatcaatccctcagtagtgctaattacggccaaaccttctggggccaggggacccaggtcaccgtctcctca

SEQ ID NO: 3559 - DNA, 360 bp, synthetic construct
  source 1..360: mol_type = other DNA
gaggtgcagctggtggagtctgggggaggcttggtgcaggctggggggtctctgagactctcctgtgcagcctctggaagcatccgcaatatcaatggcatgggctggtaccgccaggctccagggaagcagcgcgagttggtcgcgggtattcgtagtaacagtatagcaaactatgcggactccgtgaagggccgattcaccatctccagagataatgccaagaacgcggtgtatctgcagatgaacagcctgaaacctgaggacacagccgtctattactgttattatcaatccctcagtagtgttaattggggccaagtcttctggggccaggggacccaggtcaccgtctcctca

SEQ ID NO: 3560 - DNA, 360 bp, synthetic construct
  source 1..360: mol_type = other DNA
gaggtgcagctggtggagtctgggggagacttggtgcaggctggggggtctctgagagtctcctgtgcagcctctggaagcatcttcaggaccgatgccatgggctggcaccgccaggttccagggaagcagcgcgagtttgtcgcgggtattcgtagtgatggatacacaaactatgcggactccgtgaagggccgattcaccatctccagggataccgtcaagaacacggtgtatctgcagatgaacagcctgaaacctgaggacacagccgtctatagctgttattatcaatccctcagtagtcctaatttcggccaaaccttctggggccaggggacccaggtcaccgtctcctca

SEQ ID NO: 3561 - DNA, 360 bp, synthetic construct
  source 1..360: mol_type = other DNA
gaggtgcagctggtggagtctgggggagacttggtgcaggctggggggtctctgagactctcctgtgcagcctctggaagcatcgtcagtacgaatggcatgggatggcaccgccaggttccagggaagggccgcgagttggtcgcaggtattcgtagtgatggatttacaaactatgcggactccgtgaagggccgattcaccatctccagcgataacgtcaagaacacggtgtatctgcagatgaacagcctgaaagctgaggactcaggcgtctatttttgttattatcaagccctcagttctcctaattttggccaactcttctggggccaggggacccaggtcaccgtctcctca

SEQ ID NO: 3562 - DNA, 360 bp, synthetic construct
  source 1..360: mol_type = other DNA
gaggtgcagctggtggagtctgggggaggcttggtgcaggctggggggtctcagagactctcctgtgcagcctctggaagcatcttcagtttcaatggcatgggctggtaccgccaggctccagggaagcagcgcgagttggtcgcaggtattcgtagtaatggtttagcaaattatggggactccgtgaagggccgattcaccatctcgagagataacgccaagaacacggtgtatctgcggatgaacagcctgaaacctgaggacacagccgattattattgttattatcaatccttcaacagtgctaattacggccaactcttctggggccaggggacccaggtcaccgtctcctca

SEQ ID NO: 3563 - DNA, 360 bp, synthetic construct
  source 1..360: mol_type = other DNA
gaggtgcagctggtggagtctgggggaggctcggtgcaggctggggggtctctgaggctctcctgtgcagcctctggaagcatcaacagttccaatggcatgggctggtaccgccaggctccagggaagcagcgcgagttggtcgcaggaattcgtagtgatggtatggcaaattatggggactccgtgaagggccgattcaccatctccggagataacgccaagagcacggtgtatctgcagatgaacgccctgaaacctgaggacacagccgactatagttgttattatcaatccctcagtagtgctaatttcggccaactcttctggggccaggggacccaggtcaccgtctcctca

SEQ ID NO: 3564 - DNA, 360 bp, synthetic construct
  source 1..360: mol_type = other DNA
gaggtgcagctggtggagtctgggggaggctcggtgcaggctggggggtctctgaggctctcctgtgcagcctctggaagcatcttcagtttcaatgccatgggctggtaccgccaggctccagggaagcagcgcgagttggtcgcaggaattcgtagtaatggtatggcaaattatggggactccgtgaagggccgattcaccatctccggagataacgccaagagcacggtgtatctgcagatgaacagcctgaaacctgaggacacagccgactattattgttattatcaatccctccgtagtgctaattacggccaactcttctggggccaggggacccaggtcaccgtctcctca

SEQ ID NO: 3565 - DNA, 360 bp, synthetic construct
  source 1..360: mol_type = other DNA
gaggtgcagctggtggagtctgggggaggctcggtgcaggctggggggtctctgaggctctcctgtgcagcctctggaagcatcttcagtttcaatgccatgggctggtaccgccaggctccagggaagcagcgcgagttggtcgcaggaattcgtagtaatggtatggcaaattatggggactccgtgaagggccgattcaccatctccggagataacgccaagagcacggtgtatctgcagatgaacagcctgaaacctgaggacacagccgactattattgttattatcaatccctcagtagtgctgattacggccaactcttctggggccaggggacccaggtcaccgtctcctca

SEQ ID NO: 3566 - DNA, 360 bp, synthetic construct
  source 1..360: mol_type = other DNA
gaggtgcagctggtggagtctgggggaggctcggtgcaggctggggggtctctgaggctctcctgtgcagcctctggaagcatcttcagtttcaatgccatgggctggtaccgccaggctccagggaagcagcgcgagttggtcgcaggaattcgtagtaatggtatggcaaattatggggactccgtgaagggccgattcaccatctccggagataacgccaagagcacggtgtatctgcagatgaacagcctgaaacctgaggacacagccgactattattgttattatcaatccctcagtagtgctagttacggccaactcttctggggccaggggacccaggtcaccgtctcctca

SEQ ID NO: 3567 - DNA, 360 bp, synthetic construct
  source 1..360: mol_type = other DNA
gaggtgcagctggtggagtctgggggaggctcggtgcaggctggggggtctctgaggctctcctgtgcagcctctggaagcatcttcagtttcaatgccatgggctggtaccgccaggctccagggaagcagcgcgagttggtcgcaggaattcgtagtaatggtatggcaaattatggggactccgtgaagggccgattcaccatctccggagataacgccaagagcacggtgtatctgcagatgaacagcctgaaacctgaggacacagccgactattattgttattctcaatccctcagtagtgctaattacggccaactcttctggggccaggggacccaggtcaccgtctcctca

SEQ ID NO: 3568 - DNA, 360 bp, synthetic construct
  source 1..360: mol_type = other DNA
gaggtgcagctggtggagtctgggggaggcttggtgcaggctggggggtctctgagactctcctgtgcagcctctggaagcatcttcagtttcaatgccatgggctggtaccgccaggctccagggaagcagcgcgagttggtcgcaggaattcgtagtaatggtatggcaaattatggggactccgtgaagggccgattcaccatctccggagataacgccaagagcacggtgtatctgcagatgaacagcctgaaacctgaggacacagccgactattattgttattatcaatccctcagtggtgctaattacggccaactcttctggggccaggggacccaggtcaccgtctcctca

SEQ ID NO: 3569 - DNA, 360 bp, synthetic construct
  source 1..360: mol_type = other DNA
gaggtgcagctggtggagtctgggggagacttggtgcaggctggggggtctctgagactctcctgtgcagcctctggaagcatcttcagtttcaatgccatgggctggtaccgccaggctccagggaagcagcgcgagttggtcgcaggaattcggagtaatggtatggcaaattatggggactccgtgaagggccgattcaccatctccggagataacgccaagagcacggtgtatctgcagatgaacagcctgaaacctgaggacacagccgactattattgttattatcaatccctcagtggtgctaattacggccaactcttctggggccaggggacccaggtcaccgtctcctca

SEQ ID NO: 3570 - DNA, 360 bp, synthetic construct
  source 1..360: mol_type = other DNA
gaggtgcagctggtggagtctgggggaggcttggtgcaggctggggggtctctgagactctcctgtgcagcctctggaggcatcttcagtggcaatgcaatgggctggtaccgccaggctccagggaagcagcgcgagttggtcgcaggtattcatagtaatggtataacaaactatgcggactccgtgaagggccgattcaccatctccagagataacgtcaagaacacggtgtatctgcagatgaacagcctgaaacctgaggacacagccgtctattactgttattatcaatccctcagtagtgctaattacggccaaaccttctggggccaggggacccaggtcaccgtctcctca

SEQ ID NO: 3571 - DNA, 360 bp, synthetic construct
  source 1..360: mol_type = other DNA
gaggtgcagctggtggagtctgggggaggctcggtgcaggctggggggtctctgaggctctcctgtgcagcctctggaagcatctccagtttcaatggcatgggctggtaccgccaggctccagggaagcagcgcgagttggtcgcaggaattcgtagtgatggtatggaaaattatggggactccgtgaagggccgattcaccatctccggagataacgccaagagcacggtgtatctgcagatgagcagcctgaaacctgaggacacagccgactattattgttattatcaatccctcagtagtgctaattttggccaactcttctggggccaggggacccaggtcaccgtctcctca

SEQ ID NO: 3572 - DNA, 360 bp, synthetic construct
  source 1..360: mol_type = other DNA
gaggtgcagctggtggagtctgggggagacttggtgcaggctggggggtctctgagactctcctgtgcagcctctggaagcatccgcaatatcaatggcatgggctggtaccgccaggctccagggaagcagcgcgagttggtcgcgggtattcgtagtaacagtgaaccaaactatgcggactccgtgaagggccgattcaccatctccagagataatgccaagaacgcggtgtatctgcagatgaacagcctgaaacctgaggacacagccgtctattactgttattatcaatccctcagtagtgttaattggggccaagtcttctggggccaggggacccaggtcaccgtctcctca

SEQ ID NO: 3573 - DNA, 360 bp, synthetic construct
  source 1..360: mol_type = other DNA
gaggtgcagctggtggagtctgggggaggcttggtgcaggctggggggtctctgagactctcctgtgcagcctctggaagcatcttcagtgctaatggtatgggctggtaccgccaggctccagggaagcagcgcgagttggtcgcaggtattcgtacgaatgaaatagcaaactatggggactccgtgaagggccgattcaccatctccagagataacgccaagaacacggtgtatctgcagatgaacatactgaaacctgaggacacagccgactattactgttattatcaatccctcagtagtgctaattacggccaactcttctggggccaggggacccaggtcaccgtctcctca

SEQ ID NO: 3574 - DNA, 360 bp, synthetic construct
  source 1..360: mol_type = other DNA
gaggtgcagctggtggagtctgggggggacttggtgcaggctggggggtctctgagactctcctgcgcagcctctggaagcatcgtcagtacgaatggcatgggatggcaccgccaggttccagggaagggacgcgagttggtcgcaggtattcgtagtgatgggtttacaaactatgcggactccgtgaagggccgattcaccatctccagcgataacgtcaagaacacggtgtatctgcagatgaacagcctgaaagctgaggactcaggcgtctatttttgttattatcaagccctcagtactcctaattacggccaagtcttctggggccaggggacccaggtcaccgtctcctca

SEQ ID NO: 3575 - DNA, 360 bp, synthetic construct
  source 1..360: mol_type = other DNA
gaggtgcagctggtggagtctgggggaggattggtgcaggctggggggtctctgagactctcctgtgcagcctctggaagcatcgtcagtacgaatggcatgggatggcaccgccaggttccagggaagggacgcgagttggtcgcaggtattcgtagtgatggatttacaaactatgcggactccgtgaagggccgattcaccatctccagcgataacgtcaagaacacggtgtatctgcagatgaacagcctgaaagctgaggactcaggcgtctatttttgttattatcaagccctcagtactcctaattacggccaagtcttctggggccaggggacccaggtcaccgtctcctca

SEQ ID NO: 3576 - DNA, 360 bp, synthetic construct
  source 1..360: mol_type = other DNA
gaggtgcagctggtggagtctgggggagacttggtgcaggctggggggtctctgagactctcctgtgcagcctctggaagcatcgtcagtaccaatggcatgggatggcaccgccaggttccagggaagggacgcgagttggtcgcaggtattcgtagtgatggatttacaaactatgcggactccgtgaagggccgattcaccatctccagcgataacgtcaagaacacggtgtatctgcagatgaacagcctgaaagctgaggactcaggcgtctatttttgttattatcaagccctcagtactcctaatttcggtcaaacgttctggggccaggggacccaggtcaccgtctcctca

SEQ ID NO: 3577 - DNA, 360 bp, synthetic construct
  source 1..360: mol_type = other DNA
gaggtgcagctggtggagtctgggggagacttggtgcaggctggggggtctctgagactctcctgtgcagcctctggaagcatcgtcagtacgaatggtatgggatggcaccgccaggttccagggaagggacgcgagttggtcgcaggtattcgtagtgatggatttacaaactatgcggactccgtgaagggccgattcaccatctccagcgataacgtcaagaacacggtgtatctgcagatgaacagcctgaaagctgaggactcaggcgtctatttttgttattatcaagccctcagtactcctaattacggccaaacgatctggggccaggggacccaggtcaccgtctcctca

SEQ ID NO: 3578 - DNA, 360 bp, synthetic construct
  source 1..360: mol_type = other DNA
gaggtgcagctggtggagtctgggggagacttggtgcaggctggggggtctctgagactctcctgtgcagcctctggaagcatcgtcagtacgaatggcatgggatggcaccgccaggttccagggaagggacgcgagttggtcgcaggtattcgtagtgatggatttacaaactatgcggactccgtgaagggccgattcaccatctccagcgataacgtcaagaacacggtgtatctgcagatgaacagcctgaaagctgaggactcaggcgtctatttttgttattatcaagccctcagtactcctaatttcggccaaacgatctggggccaggggacccaggtcaccgtctcctca

SEQ ID NO: 3579 - DNA, 360 bp, synthetic construct
  source 1..360: mol_type = other DNA
gaggtgcagctggtggagtctgggggaggctcggtgcaggctggggggtctctgagactctcctgtgcagcctctggaagcatcgtcagtacgaatggcatgggatggcaccgccaggttccagggaagggacgcgagttggtcgcaggtattcgtagtgatggatttacaaactatgcggactccgtgaagggccgattcaccatctccagcgataacgtcaagaacacggtgtatctgcagatgaacagcctgaaagctgaggactcaggcgtctatttttgttattatcaagccctcagtactcctaattacggccaagtcttctggggccaggggacccaggtcaccgtctcctca

SEQ ID NO: 3580 - DNA, 360 bp, synthetic construct
  source 1..360: mol_type = other DNA
gaggtgcagctggtggagtctgggggagacttggtgcaggctggggggtctctgagactctcctgtgcagcctctggaagcatcgtcagtacgaatggcatgggatggcaccgccaggttccagggaagggccgcgagttggtcgcaggtattcgtagtgatggatttacaaactatgcggactccgtgaagggccgattcaccatctccagcgataacgtcaagaacacggtgtatctgcagatgaacagcctgaaagctgaggactcaggcgtctatttttgttattatcaagccctcagttctcctaattacggccacgtcttctggggccaggggacccaggtcaccgtctcctca

SEQ ID NO: 3581 - DNA, 360 bp, synthetic construct
  source 1..360: mol_type = other DNA
gaggtgcagctggtggagtctgggggagacttggtgcaggctggggggtctctgagactctcctgtgcagcctctggaagcatcgtcagtacgaatggcatgggatggcaccgccaggttccagggaagggacgcgagttggtcgccggtattcgtagtgatggatttacaaactatgcggactccgtgaagggccgattcaccatctccagcgataacgtcaagaacacggtgtatctgcagatgaacagcctgaaagctgaggactcaggcgtctatttttgttattatcaagccctcggtagtcctaattacggtcaagtcttctggggccaggggacccaggtcaccgtctcctca

SEQ ID NO: 3582 - DNA, 360 bp, synthetic construct
  source 1..360: mol_type = other DNA
gaggtgcagctggtggagtctgggggagacttggtgcaggctggggggtctctgagactctcctgtgcagcctctggaagcatcgtcagtacgaatggcatgggatggcaccgccaggttccagggaagggccgcgagttggtcgcaggtattcgtagtgatggatttacaaactatgcggactccgtgaagggccgattcaccatctccagcgataacgtcaagaacacggtgtatctgcagatgaacagcctgaaagctgaggactcaggcgtctatttttgttattatcaagccctcagttctcctaattttggccaagtcttctggggccaggggacccaggtcaccgtctcctca

SEQ ID NO: 3583 - DNA, 360 bp, synthetic construct
  source 1..360: mol_type = other DNA
gaggtgcagctggtggagtctgggggagacttggtgcaggctggggggtctctgagactctcctgtgcagcctctggaagcatcgtcagtacgaatggcatgggatggcaccgccaggttccagggaagggacgcgagttggtcgcaggtattcgtagtgatggatttacaaactatgcggactccgtgaagggccgattcaccatctccagcgataacgtcaagaacacggtgtatctgcagatgaacagcctgaaagctgaggactcaggcgtctatttttgttatgatcaagccctcagtactcctaattccggccaagtcttctggggccaggggacccaggtcaccgtctcctca

SEQ ID NO: 3584 - DNA, 360 bp, synthetic construct
  source 1..360: mol_type = other DNA
gaggtgcagctggtggagtctgggggaggcttggtgcaggctggggggtctctgagactctcctgtgcagcctctggaagacgcttcagttccaatgccatgggctggcaccgccaggttccagggaaccagcgcgagttggtcgcaggtattcgtagtgatggatatacaaactatgcggcttccgtgaagggccgattcaccatctccagcgataacgtcaacaacacggtgtatctgcagatgaacagcctgaaacctgaggacacagccgtctattcctgttattatcaatccctcagtactcctaattacggccaagtctcctggggccaggggacccaggtcaccgtctcctca

SEQ ID NO: 3585 - DNA, 360 bp, synthetic construct
  source 1..360: mol_type = other DNA
gaggtgcagctggtggagtctgggggaggcttggtgcaggctggggggtctctgagactctcctgtgcagcctctggaagacgcttcagttccaatgccatgggctggcaccgccaggttccagggaaccagcgcgagttggtcgcaggtattcgtagtgatggatatacaaactatgcggcttccgtgaagggccgattcaccatctccagcgataacgtcaacaacacggtgtatctgcagatgaacagcctgaaacctgaggacacagccgtctattcctgttattatcaatccctcagtactcctaattacggccaagtcctctggggccaggggacccaggtcaccgtctcctca

SEQ ID NO: 3586 - DNA, 360 bp, synthetic construct
  source 1..360: mol_type = other DNA
gaggtgcagctggtggagtctgggggagacttggtgcaggctggggggtctctgagactctcctgtgcagcctctggaagcatcgtcagtacgaatggcatgggatggcaccgccaggttccagggaagggacgcgagttggtcgcaggtattcgtagtgatggatttacaaactatgcggactccgtgaagggccgattcaccatctccagcgataacgtcaagaacacggtgtatctgcagatgaacagcctgaaagctgaggactcaggcgtctatttttgttattatcaagccctcagtagtgctaattacggccaagtcttctggggccaggggacccaggtcaccgtctcctca

SEQ ID NO: 3587 - DNA, 360 bp, synthetic construct
  source 1..360: mol_type = other DNA
gaggtgcagctggtggagtctgggggagacttggtgcaggctggggggtctctgagactctcctgtgcagcctctggaagcatcgtcagtacgaatggcatgggatggcaccgccaggttccagggaagggacgcgagttggtcgcaggtattcgtagtgatggatttacaaactatgcggactccgtgaagggccgattcaccatctccagcgataacgtcaagaacacggtgtatctgcagatgaacagcctgaaagctgaggactcaggcgtctatttttgttattatcaagccctcagtactcctaatttcggccaactcttctggggccaggggacccaggtcaccgtctcctca

SEQ ID NO: 3588 - DNA, 360 bp, synthetic construct
  source 1..360: mol_type = other DNA
gaggtgcagctggtggagtctgggggagacttggtgcaggctggggggtctctgagactctcctgtgcagcctctggaagcatcgtcagtaccaatagcatgggctggcaccgccaggttccagggaagcgacgcgagttggtcgcaggtattcgtagtgatggattcataaactatgcggactccgtgaagggccgattcaccatctccagcgataacgtcaacaacacggtgtatctgcagatgaacagcctgaaacctgaggacacagccgtctatttgtgtttttatcaaaccctcagtactcctaattacggccaagtcttctggggccaggggacccaggtcaccgtctcctca

SEQ ID NO: 3589 - DNA, 360 bp, synthetic construct
  source 1..360: mol_type = other DNA
gaggtgcagctggtggagtctgggggaggctcggtgcaggctggggggtctctgaggctctcctgtgcagcctctggaagcatcttcagtctcaatggcatgggctggcaccgccaggctccagggaagcagcgcgagttggtcgcaggaattcgtagtgatggtatggtaaattatggggactccgtgaagggccgattcaccatctccggagataacgccaagagcacggtgtatctgcagatgaacagcctgaaacctgaggacacagccgactattattgttattatcaagccctcagtagtgctaattacggccaagtcttctggggccaggggacccaggtcaccgtctcctca

SEQ ID NO: 3590 - DNA, 360 bp, synthetic construct
  source 1..360: mol_type = other DNA
gaggtgcagctggtggagtctgggggaggcttggtgcaggctggggggtctctgagactctcctgtgcagcctctggaagacgcttcagtgccaatgccatgggctggcaccgccaggttccagggaaccagcgcgagttggtcgcaggtatgcaaagtaatggatatacaaactatgcggcttccgtgaagggccgattcaccatctccagcgataacgtcaacaacacggtgtatctgcagatgaacagcctgaaacctgaggacacagccgtctattactgttattatcaatccctcagtactcctaattacggccaagtctactggggccaggggacccaggttaccgtctcctca

SEQ ID NO: 3591 - DNA, 360 bp, synthetic construct
  source 1..360: mol_type = other DNA
gaggtgcagctggtggagtctgggggagacttggtgcaggctggggggtctctgagactctcctgtgcagcctctggaagcatcgtcagtacgaatggcatgggatggcaccgccaggttccagggaagggccgcgagttggtcgcaggtattcgtagtgatggatttacaaactatgcggactccgtgaagggccgattcaccatctccagcgataacgtcaagaacacggtgtatctgcagatgaacagcctgaaagctgaggactcaggcgtctatttttgttattatcaagccctcagttcgcctacttacggccaacccttctggggccaggggacccaggtcaccgtctcctca

SEQ ID NO: 3592 - DNA, 360 bp, synthetic construct
  source 1..360: mol_type = other DNA
gaggtgcagctggtggagtctgggggagacttggtgcaggctggggggtctctgagactctcctgtgcagcctctggaagcatcgtcagcacgaatggcatgggatggcaccgccaggttccagggaagggccgcgagttggtcgcaggtattcgtagtgatggatttacaaactatgcggactccgtgaagggccgattcaccatctccagcgataacgtcaagaacacggtgtatctgcagatgaacagcctgaaagctgaggactcaggcgtctatttttgttattatcaagccctcagtactcctaattccggccaaaccttctggggccaggggacccaggtcaccgtctcctca

SEQ ID NO: 3593 - DNA, 360 bp, synthetic construct
  source 1..360: mol_type = other DNA
gaggtgcagctggtggagtctgggggagacttggtgcaggctggggggtctctgagactctcctgtgcagcctctggaagcatcgtcagtacgaatggcatgggatggcaccgccaggttccagggaagggacgcgagttggtcgcaggtattcgtagtgatggatttacaaactatgcggactccgtgaagggccgattcaccatctccagcgataacgtcaagaacacggtgtatctgcagatgaacagcctgaaagctgaggactcaggcgtctatttttgttattatcaagccctcagtactcctaattacggccaaacctactggggccaggggacccaggtcaccgtctcctca

SEQ ID NO: 3594 - DNA, 360 bp, synthetic construct
  source 1..360: mol_type = other DNA
gaggtgcagctggtggagtctgggggagacttggtgcaggctggggggtctctgagactctcctgtgcagcctctggaagcatcgtcagtacgaatggcatgggatggcaccgccaggttccagggaagggccgcgagttggtcgcaggtattcgtagtgatggatttacaaactatgcggactccgtgaagggccgattcaccatctccagcgataacgtcaagaacacggtgtatctgcagatgaacagcctgaaagctgaggactcaggcgtctatttttgttattatcaagccatcagttctcctaattacggccaagtcttctggggccaggggacccaggtcaccgtctcctca

SEQ ID NO: 3595 - DNA, 360 bp, synthetic construct
  source 1..360: mol_type = other DNA
gaggtgcagctggtggagtctgggggagacttggtgcaggctggggggtctctgagactctcctgtgcagcctctggaagcatcgtcagtacgaatggcatgggatggcaccgccaggttccagggaagggacgcgagttggtcgcaggtattcgtagtgatggatttacaaactatgcggactccgtgaagggccgattcaccatctccagcgataacgtcaagaacacggtgtatctgcagatgaacagcctgaaagctgaggactcaggcgtctatttttgttattatcacgccctcagtactcctaattccggccaagtcttctggggccaggggacccaggtcaccgtctcctca

SEQ ID NO: 3596 - DNA, 360 bp, synthetic construct
  source 1..360: mol_type = other DNA
gaggtgcagctggtggagtctgggggagacttggtgcaggctggggggtctctgagactctcctgtgcagcctctggaagcatcgtcagtacgaatggcatgggatggcaccgccaggttccagggaagggacgcgagttggtcgcaggtattcgtagtgatggatttacaaactatgcggactccgtgaagggccgattcaccatctccagcgataacgtcaagaacacggtgtatctgcagatgaacagcctgaaagctgaggactcaggcgtctatttttgttattatcaagccctcagtactccgaagtccggccaagtcttctggggccaggggacccaggtcaccgtctcctca

SEQ ID NO: 3597 - DNA, 360 bp, synthetic construct
  source 1..360: mol_type = other DNA
gaggtgcagctggtggagtctgggggagacttggtgcaggctggggggtctctgagactctcctgtgcagcctctggaagcatcgtcagtacgaatggcatgggatggcaccgccaggttccagggaagggacgcgagttggtcgcaggtattcgtagtgatggatttacaaactatgcggactccgtgaagggccgattcaccatctccagcgataacgtcaagaacacggtgtatctgcagatgaacagcctgaaagctgaggactcaggcgtctatttttgttattatcaagccctcagtactcctcattccggccaagtcttctggggccaggggacccaggtcaccgtctcctca

SEQ ID NO: 3598 - DNA, 360 bp, synthetic construct
  source 1..360: mol_type = other DNA
gaggtgcagctggtggagtctgggggagacttggtgcaggctggggggtctctgaggctctcctgtgcagcctctggaagcatcgtcagtaccaatagtatgggctggcaccgccaggttccagggaagggacgcgagttggtcgcaggtattcgtagtgatggattcataaactatgcggactccgtgaagggccgattcaccatctccagcgataacgtcaacaacacggtgtatttgcagatgaacagcctgaaacctgaggatacagccgtctatttgtgtttttatcaacccctcagtactcctaattacggccaagtcttctggggccaggggacccaggtcaccgtctcctca

SEQ ID NO: 3599 - DNA, 360 bp, synthetic construct
  source 1..360: mol_type = other DNA
gaggtgcagctggtggagtctgggggagacttggtgcaggctggggggtctctgagactctcctgtgcagcctctggaagcatcgtcagtaccaatagcatgggctggcaccgccaggttccagggaagcgacgcgagttggtcgcaggtattcgtagtgatggattcataaactatgcggactccgtgaagggccgattcaccatctccagcgataacgtcaacaacacggtgtatctgcagatgaacagcctgaaacctgaggacacagccgtctatttgtgtttttatcaacccctcagtactcctaattacggccaagtcttctggggccaggggacccaggtcaccgtctcctca

SEQ ID NO: 3600 - DNA, 360 bp, synthetic construct
  source 1..360: mol_type = other DNA
gaggtgcagctggtggagtctgggggaggcttggtgcaggctggggggtctctgagactctcctgtgcagcctctggaagacgcttcagtgccaatgccatgggctggcaccgccaggttccagggaaccagcgcgagttggtcgcaggtattaatagtaatggatatacaaactacgcggcttccgtgaagggccgattcaccatctccagcgataacgtcaacaacacggtgtatctgcagatgaacagcctgaaacctgaggacacagccgtctattactgttattatcaatccctcagtactcctaattacggccgagtcttctggggccaggggacccaggtcaccgtctcctca

SEQ ID NO: 3601 - DNA, 360 bp, synthetic construct
  source 1..360: mol_type = other DNA
gaggtgcagctggtggagtctgggggaggcttggtgcaggctggggggtctctgagactctcctgtgcagcctctggaagacgcttcagtgccaatgccatgggctggcaccgccaggttccagggaaccagcgcgagttggtcgcaggtatgcaaagtaacggatatacaaactatgcggcttccgtgaagggccgattcaccatctccagcgataacgtcaacaacacggtgtatctgcagatgaacagcctgaaacctgaggacacagccgtctattactgttattatcaatccctcagtactcctaattccggccaagtcttctggggccaggggacccaggtcaccgtctcctca

SEQ ID NO: 3602 - DNA, 360 bp, synthetic construct
  source 1..360: mol_type = other DNA
gaggtgcagctggtggagtctgggggagacttggtgcaggctggggggtctctgagactctcctgtgcagcctctggaagacgcttcagttccaatgccatgggctggcaccgccaggttccagggaaccagcgcgagttggtcgcaggtattcgtagtgatggatatacaaactatgcggcttccgtgaagggccgattcaccatctccagcgataacgtcaacaacacggtgtatctgcagatgaacagcctgaaacctgaggacacagccgtctattcctgttattatcaatccctcagtactcctaattacggccaagtcctctggggccaggggacccaggtcaccgtctcctca

SEQ ID NO: 3603 - DNA, 360 bp, synthetic construct
  source 1..360: mol_type = other DNA
gaggtgcagctggtggagtctgggggagacttggtgcaggctggggggtctctgagactctcctgtgcagcctctggaagcatcgtcagtaccaaagccatgggatggcaccgccaggttccagggaagcgacgcgagttggtcgcaggtattcgtagtgatggatttacaaactatgcggactccgtgaagggccgattcaccatctccagcgatagcgtcaacgacacggtgtatctgcagatgaacagcctgaaagctgaagacaccgccgtctatttttgtttttatcaagccctcagtactcctaattacggccaaaccttctggggccaggggacccaggtcaccgtctcctca

SEQ ID NO: 3604 - DNA, 360 bp, synthetic construct
  source 1..360: mol_type = other DNA
gaggtgcagctggtggagtctgggggagacttggtgcaggctggggggtctctgagactctcctgtgcagcctctggaagcatcgtcagtaccaatgccatgggatggcaccgccaggttccagggaagggacgcgagttggtcgcaggatttcgtagtgatggatttacaaactatgcggactccgtgaagggccgattcaccatctccagcgataacgtcaagaacacggtgtatctgcagatgaacagcctgaaagctgaggacacagccgtctatttttgtttttatcaagccctcagtactcctaatttcggtcaaacgttctggggccaggggacccaggtcaccgtctcctca

SEQ ID NO: 3605 - DNA, 360 bp, synthetic construct
  source 1..360: mol_type = other DNA
gaggtgcagctggtggagtctgggggagacttggtgcaggctggggggtctctgagactctcctgtgcagcctctggaagcatcgtcagtacgaatggcatgggatggcaccgccaggttccagggaagggccgcgagttggtcgcaggtattcgtagtgatggatttacaaactatgcggactccgtgaagggccgattcaccatctccagcgataacgtcaagaacacggtgtatctgcagatgaacagcctgaaagctgaggactcaggcgtctatttttgttattatcaagccctcagttctcctcattacggccaacccttctggggccaggggacccaggtcaccgtctcctca

SEQ ID NO: 3606 - DNA, 360 bp, synthetic construct
  source 1..360: mol_type = other DNA
gaggtgcagctggtggagtctgggggagacttggtgcaggctggggggtctctgagactctcctgtgcagcctctggaagcatcgtcagtacgaatggcatgggatggcaccgccaggttccagggaagggccgcgagttggtcgcaggtattcgtagtgatggatttacaaactatgcggactccgtgaagggccgattcaccatctccagcgataacgtcaagaacacggtgtatctgcagatgaacagcctgaaagctgaggactcaggcgtctatttttgttattatcaagcccacagttctcctaattacggccaacccttctggggccaggggacccaggtcaccgtctcctca

SEQ ID NO: 3607 - DNA, 360 bp, synthetic construct
  source 1..360: mol_type = other DNA
gaggtgcagctggtggagtctgggggagacttggtgcaggctggggggtctctgagactctcctgtgcagcctctggaagcatcgtcagtacgaatggcatgggatggcaccgccaggttccagggaagggccgcgagttggtcgcaggtattcgtagtgatggatttacaaactatgcggactccgtgaagggccgattcaccatctccagcgataacgtcaagaacacggtgtatctgcagatgaacagcctgaaagctgaggactcaggcgtctatttttgttattatcaagccctcagttctcctaattacggccaaccctactggggccaggggacccaggtcaccgtctcctca

SEQ ID NO: 3608 - DNA, 360 bp, synthetic construct
  source 1..360: mol_type = other DNA
gaggtgcagctggtggagtctgggggagacttggtgcaggctggggggtctctgagactctcctgtgcagcctctggaagcatcgtcagtacgaatggcatgggatggcaccgccaggttccagggaagggccgcgagttggtcgcaggtattcgtagtgatggatttacaaactatgcggactccgtgaagggccgattcaccatctccagcgataacgtcaagaacacggtgtatctgcagatgaacagcctgaaagctgaggactcaggcgtctatttttgttattatcaagccctcggttctcctaattacggccaacccttctggggccaggggacccaggtcaccgtctcctca

SEQ ID NO: 3609 - DNA, 360 bp, synthetic construct
  source 1..360: mol_type = other DNA
gaggtgcagctggtggagtctgggggagacttggtgcaggctggggggtctctgagactctcctgtgcagcctctggaagcatcgtcagtacgaatggcatgggatggcaccgccaggttccagggaagggccgcgagttggtcgcaggtattcgtagtgatggatttacaaactatgcggactccgtgaagggccgattcaccatctccagcgataacgtcaagaacacggtgtatctgcagatgaacagcctgaaagctgaggactcaggcgtctatttttgttattatcaagccctcagttctcctagttacggtcaagtcttctggggccaggggacccaggtcaccgtctcctca

SEQ ID NO: 3610 - DNA, 360 bp, synthetic construct
  source 1..360: mol_type = other DNA
gaggtgcagctggtggagtctgggggggacttggtgcaggctggggggtctctgagactctcctgtgcagcctctggaagcatcgtcagtacgaatggcatgggatggcaccgccaggttccagggaagggacgcgagttggtcgcaggtattcgtagtgatggatttacgaactatgcggactccgtgaagggccgattcaccatctccagcgataacgtcaagaacacggtgtatctgcagatgaacagcctgaaagctgaggactcaggcgtctatttttgttattatcaagccctcagtgctcctaattacagccaagtcttctggggccaggggacccaggtcaccgtctcctca

SEQ ID NO: 3611 - DNA, 360 bp, synthetic construct
  source 1..360: mol_type = other DNA
gaggtgcagctggtggagtctgggggagacttggtgcaggctggggggtctctgagactctcctgtgcagcctctggaagcatcgtcagtacgaatggcatgggatggcaccgccaggttccagggaagggccgcgagttggtcgcaggtattcgtagtgatggatttacaaactatgcggactccgtgaagggccgattcaccatctccagcgataacgtcaagaacacggtgtatctgcagatgaacagcctgaaagctgaggactcaggcgtctatttttgttattatcaagccctcagttcacctaattccggccaagtcttctggggccaggggacccaggtcaccgtctcctca

SEQ ID NO: 3612 - DNA, 360 bp, synthetic construct
  source 1..360: mol_type = other DNA
gaggtgcagctggtggagtctgggggagacttggtgcaggctggggggtctctgagactctcctgtgcagcctctggaagcatcgtcagtacgaatggcatgggatggcaccgccaggttccagggaagggccgcgagttggtcgcaggtattcgtagtgatggatttacaaactatgcggactccgtgaagggccgattcaccatctccagcgataacgtcaagaacacggtgtatctgcagatgaacagcctgaaagctgaggactcaggcgtctatttttgttattatcaagccctcagttctcctaattacggccgagtcttctggggccaggggacccaggtcaccgtctcctca

SEQ ID NO: 3613 - DNA, 360 bp, synthetic construct
  source 1..360: mol_type = other DNA
gaggtgcagctggtggagtctgggggagacttggtgcaggctggggggtctctgagactctcctgtgcagcctctggaagcatcgtcagtacgaatggcatgggatggcaccgccaggttccagggaagggacgcgagttggtcgcaggtattcgtagtgatggatttacaaactatgcggactccgtgaagggccgattcaccatctccagcgataacgtcaagaacacggtgtatctgcagatgaacagcctgaaagctgaggactcaggcgtctatttttgttatgatcaagccctcagtactcctaatgacggccaagtcttctggggccaggggacccaggtcaccgtctcctca

SEQ ID NO: 3614 - DNA, 360 bp, synthetic construct
  source 1..360: mol_type = other DNA
gaggtgcagctggtggagtctgggggagacttggtgcaggctggggggtctctgagactctcctgtgcagcctctggaagcatcgtcagtacgaatggcatgggatggcaccgccaggttccagggaagggacgcgagttggtcgcaggtattcgtagtgatggatttacaaactatgcggactccgtgaagggccgattcaccatctccagcgataacgtcaagaacacggtgtatctgcagatgaacagcctgaaagctgaggactcaggcgtctatttttgttattatcaagccctcagtactcctactgacggccaagtcttctggggccaggggacccaggtcaccgtctcctca

SEQ ID NO: 3615 - DNA, 360 bp, synthetic construct
  source 1..360: mol_type = other DNA
gaggtgcagctggtggagtctgggggagacttggtgcaggctggggggtctctgagactctcctgtgcagcctctggaagcatcgtcagtacgaatggcatgggatggcaccgccaggttccagggaagggacgcgagttggtcgcaggtattcgtagtgatggatttacaaactatgcggactccgtgaagggccgattcaccatctccagcgataacgtcaagaacacggtgtatctgcagatgaacagcctgaaagctgaggactcaggcgtctatttttgttcttatcaagccctcagtactcctaattccggccaagtcttctggggccaggggacccaggtcaccgtctcctca

SEQ ID NO: 3616 - DNA, 360 bp, synthetic construct
  source 1..360: mol_type = other DNA
gaggtgcagctggtggagtctgggggagacttggtgcaggctggggggtctctgagactctcctgtgcagcctctggaagcatcgtcagtacgaatggcatgggatggcaccgccaggttccagggaagggacgcgagttggtcgcaggtattcgtagtgatggatttacaaactatgcggactccgtgaagggccgattcaccatctccagcgataacgtcaagaacacggtgtatctgcagatgaacagcctgaaagctgaggactcaggcgtctatttttgttatgatcaagccctcagtactcctaattacggccacgtcttctggggccaggggacccaggtcaccgtctcctca

SEQ ID NO: 3617 - DNA, 360 bp, synthetic construct
  source 1..360: mol_type = other DNA
gaggtgcagctggtggagtctgggggagacttggtgcaggctggggggtctctgagactctcctgtgcagcctctggaagcatcgtcagtacgaatggcatgggatggcaccgccaggttccagggaagggacgcgagttggtcgcaggtattcgtagtgatggatttacaaactatgcggactccgtgaagggccgattcaccatctccagcgataacgtcaagaacacggtgtatctgcagatgaacagcctgaaagctgaggactcaggcgtctatttttgttattatcaagccctcagtactcctacttccggccaagtcttctggggccaggggacccaggtcaccgtctcctca

SEQ ID NO: 3618 - DNA, 360 bp, synthetic construct
  source 1..360: mol_type = other DNA
gaggtgcagctggtggagtctgggggagacttggtgcaggctggggggtctctgagactctcctgtgcagcctctggaagcatcgtcagtacgaatggcatgggatggcaccgccaggttccagggaagggacgcgagttggtcgcaggtattcgtagtgatggatttacaaactatgcggactccgtgaagggccggttcaccatctccagcgataacgtcaagaacacggtgtatctgcagatgaacagcctgaaagctgaggactcaggcgtctatttttgttattatcaagccctcagtactcctaatgacggccacgtcttctggggccaggggacccaggtcaccgtctcctca

SEQ ID NO: 3619 - DNA, 360 bp, synthetic construct
  source 1..360: mol_type = other DNA
gaggtgcagctggtggagtctgggggagacttggtgcaggctggggggtctctgagactctcctgtgcagcctctggaagcatcgtcagtacgaatggcatgggatggcaccgccaggttccagggaagggacgcgagttggtcgcaggtattcgtagtgatggatttacaaactatgcggactccgtgaagggccgattcaccatctccagcgataacgtcaagaacacggtgtatctgcagatgaacagcctgaaagctgaggactcaggcgtctatttttgttattctcaagccctcagtactcctaagtacggccaagtcttctggggccaggggacccaggtcaccgtctcctca

SEQ ID NO: 3620 - DNA, 360 bp, synthetic construct
  source 1..360: mol_type = other DNA
gaggtgcagctggtggagtctgggggagacttggtgcaggctggggggtctctgagactctcctgtgcagcctctggaagcatcgtcagtaccaatagcatgggctggcaccgccaggttccagggaagcgacgcgagttggtcgcaggtattcgtagtgatggattcataaactatgcggactccgtgaagggccgattcaccatctccagcgataacgtcaacaacacggtgtatctgcagatgaacagcctgaaacctgaggacacagccgtctatttgtgttcttatcaatccctcagtactcctaattacggccaggtcttctggggccaggggacccaggtcaccgtctcctca

SEQ ID NO: 3621 - DNA, 360 bp, synthetic construct
  source 1..360: mol_type = other DNA
gaggtgcagctggtggagtctgggggagacttggtgcaggctggggggtctctgagactctcctgtgcagcctctggaagcatcgtcagtaccaatagcatgggctggcaccgccaggttccagggaagcgacgcgagttggtcgcaggtattcgtagtgatggattcataaactatgcggactccgtgaagggccgattcaccatctccagcgataacgtcaacaacacggtgtatctgcagatgaacagcctgaaacctgaggacacagccgtctatttgtgtctttatcaatccctcagtactcctaattacggccaagtcttctggggccaggggacccaggtcaccgtctcctca

SEQ ID NO: 3622 - DNA, 360 bp, synthetic construct
  source 1..360: mol_type = other DNA
gaggtgcagctggtggagtctgggggaggcttggtgcaggctggggggtctctgagactctcctgtgcagcctctggaagacgcttcagtgccaatgccatgggctggcaccgccaggttccagggaaccagcgcgagttggtcgcaggtattaatagtaatggatatacaaactatgcggcttccgtgaagggccgattcaccatctccagcgataacgtcaacaacacggtgtatctgcagatgaacagcctgaaacctgaggacacagccgtctattactgttattatcaatccctcagtactcctaattacggccaagtcttctggggccaggggacccaggtcaccgtctcctca

SEQ ID NO: 3623 - DNA, 360 bp, synthetic construct
  source 1..360: mol_type = other DNA
gaggtgcagctggtggagtctgggggaggcttggtgcaggctggggggtctctgagactctcctgtgcagcccctggaagacgcttcagtaccaatgccatgggctggcaccgccaggttccagggaaccagcgcgagttggtcgcaggtattaatagtaatggatatacaaactatgcggcttccgtgaagggccgattcaccatctccagcgataacgtcaacaacacggtgtatctgcagatgaacagcctgaaacctgaggacacagccgtctattactgttattatcaatccctcagtactcctgattacggccaagtcttctggggccaggggacccaggtcaccgtctcctca

SEQ ID NO: 3624 - DNA, 360 bp, synthetic construct
  source 1..360: mol_type = other DNA
gaggtgcagctggtggagtctgggggaggcttggtgcaggctggggggtctctgagactctcctgtgcagcctctggaagacgcttcagtgccaatgccatgggctggcaccgccaggttccagggaaccagcgcgagttggtcgcaggtattaatagtaatggatatacaaactatgcggcttccgtgaagggccgattcaccatctccagcgataacgtcaacaacacggtgtatctgcagatgaacagcctgaaacctgaggacacagccgtctattactgttattatcaatccctcagtactcctaattccggccaagtcttctggggccaggggacccaggtcaccgtctcctca

SEQ ID NO: 3625 - DNA, 360 bp, synthetic construct
  source 1..360: mol_type = other DNA
gaggtgcagctggtggagtctgggggagacttggtgcaggctggggggtctctgagactctcctgtgcagcctctggaagcatcgtcagtacgaatggcatgggatggcaccgccaggttccagggaagggccgcgagttggtcgcaggtattcgtagtgatggatttacaaactatgcggactccgtgaagggccgattcaccatctccagcgataacgtcaagaacacggtgtatctgcagatgaacagcctgaaagctgaggactcaggcgtctatttttgttatgatcaagccctcagttctcctaattacggccaacccttctggggccaggggacccaggtcaccgtctcctca

SEQ ID NO: 3626 - DNA, 360 bp, synthetic construct
  source 1..360: mol_type = other DNA
gaggtgcagctggtggagtctgggggagacttggtgcaggctggggggtctctgagactctcctgtgcagcctctggaagcatcgtcagtacgaatggcatgggatggcaccgccaggttccagggaagggccgcgagttggtcgcaggtattcgtagtgatggatttacaaactatgcggactccgtgaagggccgattcaccatctccagcgataacgtcaagaacacggtgtatctgcagatgaacagcctgaaagctgaggactcaggcgtctatttttgttatgatcaagccctcagttctcctaattccggccaaaccttctggggccaggggacccaggtcaccgtctcctca

SEQ ID NO: 3627 - DNA, 360 bp, synthetic construct
  source 1..360: mol_type = other DNA
gaggtgcagctggtggagtctgggggagacttggtgcaggctggggggtctctgagactctcctgtgcagcctctggaagcatcgtcagtacgaatggcatgggatggcaccgccaggttccagggaagggccgcgagttggtcgcaggtattcgtagtgatggatttacaaactatgcggactccgtgaagggccgattcaccatctccagcgataacgtcaagaacacggtgtatctgcagatgaacagcctgaaagctgaggactcaggcgtctatttttgttattatcaagccctcaggtctcctaattccggccaaaccttctggggccaggggacccaggtcaccgtctcctca

SEQ ID NO: 3628 - DNA, 360 bp, synthetic construct
  source 1..360: mol_type = other DNA
gaggtgcagctggtggagtctgggggagacttggtgcaggctggggggtctctgagactctcctgtgcagcctctggaagcatcgtcagtacgaatggcatgggatggcaccgccaggttccagggaagggccgcgagttggtcgcaggtattcgtagcgatggatttacaaactatgcggactccgtgaagggccgattcaccatctccagcgataacgtcaagaacacggtgtatctgcagatgaacagcctgaaagctgaggactcaggcgtctatttttgttatgatcaagccctcagttctcctaatgacggccaaaccttctggggccaggggacccaggtcaccgtctcctca

SEQ ID NO: 3629 - DNA, 360 bp, synthetic construct
  source 1..360: mol_type = other DNA
gaggtgcagctggtggagtctgggggagacttggtgcaggctggggggtctctgagactctcctgtgcagcctctggaagcatcgtcagtacgaatggcatgggatggcaccgccaggttccagggaagggccgcgagttggtcgcaggtattcgtagtgatggatttacaaactatgcggactccgtgaagggccgattcaccatctccagcgataacgtcaagaacacggtgtatctgcagatgaacagcctgaaagctgaggactcaggcgtctatttttgttattatcaagccctcaggtctcctaaatacggccaaaccttctggggccaggggacccaggtcaccgtctcctca

SEQ ID NO: 3630 - DNA, 360 bp, synthetic construct
  source 1..360: mol_type = other DNA
gaggtgcagctggtggagtctgggggagacttggtgcaggctggggggtctctgagactctcctgtgcagcctctggaagcatcgtcagtacgaatggcatgggatggcaccgccaggttccagggaagggccgcgagttggtcgcaggtattcgtagtgatggatttacaaactatgcggactccgtgaagggccgattcaccatctccagcgataacgtcaagaacacggtgtatctgcagatgaacagcctgaaagctgaggactcaggcgtctatttttgttattctcaagccctcagttctcctaattccggccaaaccttctggggccaggggacccaggtcaccgtctcctca

SEQ ID NO: 3631 - DNA, 360 bp, synthetic construct
  source 1..360: mol_type = other DNA
gaggtgcagctggtggagtctgggggagacttggtgcaggctggggggtctctgagactctcctgtgcagcctctggaagcatcgtcagtacgaatggcatgggatggcaccgccaggttccagggaagggccgcgagttggtcgcaggtattcgtagtgatggatttacaaactatgcggactccgtgaagggccgattcaccatctccagcgataacgtcaagaacacggtgtatctgcagatgaacagcctgaaagctgaggactcaggcgtctatttttgttatgatcaagccctcagttctcctaattacggccacacgttctggggccaggggacccaggtcaccgtctcctca

SEQ ID NO: 3632 - DNA, 360 bp, synthetic construct
  source 1..360: mol_type = other DNA
gaggtgcagctggtggagtctgggggagacttggtgcaggctggggggtctctgagactctcctgtgcagcctctggaagcatcgtcagtacaaatggcatgggatggcaccgccaggttccagggaagggccgcgagttggtcgcaggtattcgtagtgatggatttacaaactatgcggactccgtgaagggccgattcaccatctccagcgataacgtcaagaacacggtgtatctgcagatgaacagcctgaaagctgaggactcaggcgtctatttttgttattctcaagccctcagttctcctaagtacggccaaaccttctggggccaggggacccaggtcaccgtctcctca

SEQ ID NO: 3633 - DNA, 360 bp, synthetic construct
  source 1..360: mol_type = other DNA
gaggtgcagctggtggagtctgggggagacttggtgcaggctggggggtctctgagactctcctgtgcagcctctggaagcatcgtcagtacgaatggcatgggatggcaccgccaggttccagggaagggccgcgagttggtcgcaggtattcgtagtgatggatttacaaactatgcggactccgtgaagggccgattcaccatctccagcgataacgtcaagaacacggtgtatctgcagatgaacagcctgaaagctgaggactcaggcgtctatttttgttattctcaagccctcagttctcctacttacggccaaaccttctggggccaggggacccaggtcaccgtctcctca

SEQ ID NO: 3634 - DNA, 360 bp, synthetic construct
  source 1..360: mol_type = other DNA
gaggtgcagctggtggagtctgggggagacttggtgcaggctggggggtctctgagactctcctgtgcagcctctggaagcatcgtcagtacgaatggcatgggatggcaccgccaggttccagggaagggccgcgagttggtcgcaggtattcgtagtgatggatttacaaactatgcggactccgtgaagggccgattcaccatctccagcgataacgtcaagaacacggtgtatctgcagatgaacagcctgaaagctgaggactcaggcgtctatttttgttatgatcaagccctcaggtctcctaattacggccaaaccttctggggccaggggacccaggtcaccgtctcctca

SEQ ID NO: 3635 - DNA, 360 bp, synthetic construct
  source 1..360: mol_type = other DNA
gaggtgcagctggtggagtctgggggagacttggtgcaggctggggggtctctgagactctcctgtgcagcctctggaagcatcgtcagtacgaatggcatgggatggcaccgccaggttccagggaagggccgcgagttggtcgcaggtattcgtagtgatggatttacaaactatgcggactccgtgaagggccgattcaccatctccagcgataacgtcaagaacacggtgtatctgcagatgaacagcctgaaagctgaggactcaggcgtctatttttgttattatcaagccctcaggtctcctaattacggccaacccttctggggccaggggacccaggtcaccgtctcctca

SEQ ID NO: 3636 - DNA, 360 bp, synthetic construct
  source 1..360: mol_type = other DNA
gaggtgcagctggtggagtctgggggagacttggtgcaggctggggggtctctgagactctcctgtgcagcctctggaagcatcgtcagtacgaatggcatgggatggcaccgccaggttccagggaagggccgcgagttggtcgcaggtattcgtagtgatggatttacaaactatgcggactccgtgaagggccgattcaccatctccagcgataacgtcaagaacacagtgtatctgcagatgaacagcctgaaagctgaggactcaggcgtctatttttgttattatcaagccctcggttctcctaattacggccacaccttctggggccaggggacccaggtcaccgtctcctca

SEQ ID NO: 3637 - DNA, 360 bp, synthetic construct
  source 1..360: mol_type = other DNA
gaggtgcagctggtggagtctgggggaggcttggtgcaggctggggggtctctgagagtctcctgtgcagcctctggaagcatcttcagggccgatgccatgggctggcaccgccaggttccagggaagccgcgcgagtttgtcgcgggtattcgtagtgatggatttaccaactatgcggaggccgtgaagggccgattcaccatctcctgggataccgtcaagaacacggtgtatctgcagatgaacagcctgaaacctgaggacacagccgtctatacttgttattatcactccctcagtagtcctagttacggtcaagtcttctggggccaggggacccaggtcaccgtctcctca

SEQ ID NO: 3638 - DNA, 360 bp, synthetic construct
  source 1..360: mol_type = other DNA
gaggtgcagctggtggagtctgggggagacttggtgcaggctggggggtctctgagagtctcctgtgcagcctctggaagcatcttcaggaccgatgccatgggctggcaccgccaggttccagggaagcagcgcgagtttgtcgcgggtattcgtagtgatggatacacaaactatgcggactccgtgaagggccgattcaccatctccagggataccgtcaagaacacggtgtatctgcagatgaacagcctgaaacctgaggacacagccgtctatagctgttattatcactccctcagtagtcctaattacgcccaagtcttctggggccaggggacccaggtcaccgtctcctca

SEQ ID NO: 3639 - DNA, 360 bp, synthetic construct
  source 1..360: mol_type = other DNA
gaggtgcagctggtggagtctgggggaggcttggtgcaggctggggggtctctgagagcctcctgtgcagcctctggaagcatcttcagggccgatgccatgggctggcaccgccaggttccagggaagccgcgcgagtttgtcgcgggtattcgtagtgatggctttaccaactatgcggaggccgtgaagggccgattcaccatctcctgggataccgtcaagaacacggtgtatctgcagatgaacagcctgaaacctgaggacacagccgtctatacttgttattatcactccctcagtagtcctaattacggtcaagccttctggggccaggggacccaggtcaccgtctcctca

SEQ ID NO: 3640 - DNA, 360 bp, synthetic construct
  source 1..360: mol_type = other DNA
gaggtgcagctggtggagtctgggggaggcttggtgcaggctggggggtctctgagagtctcctgtgcagcctctggaagcatcttcagggccgatgccatgggctggcaccgccaggttccagggaagccgcgcgagtttgtcgcgggtattcgtagtgatggatttaccaactatgcggaggccgtgaagggccgattcaccatctcctgggataccgtcaagaacacggtgtatctgcagatgaacagcctgaaacctgaggacacagccgtctatacttgttattctcactccctcagtagtcctaattacggtcaagtcttctggggccaggggacccaggtcaccgtctcctca

SEQ ID NO: 3641 - DNA, 360 bp, synthetic construct
  source 1..360: mol_type = other DNA
gaggtgcagctggtggagtctgggggaggcttggtgcaggctggggggtctctgagagtctcctgtgcagcctctggaagcatcttcagggccgatgccatgggctggcaccgccaggttccagggaagccgcgcgagtttgtcgcgggtattcgtagtgatggatttaccaactatgcggaggccgtgaagggccgattcaccatctcctgggataccgtcaagaacacggtgtatctgcagatgaacagcctgaaacctgaggacacagccgtctatacttgctattatcactccctcagtagtcctaagtacggtcaagtcttctggggccaggggacccaggtcaccgtctcctca

SEQ ID NO: 3642 - DNA, 360 bp, synthetic construct
  source 1..360: mol_type = other DNA
gaggtgcagctggtggagtctgggggaggctcggtgcaggctggggggtctctgaggctctcctgtgcagcctctggaagcatcttcagtctcaatggcatgggctggtaccgccaggctccagggaagcagcgcgagttggtcgcaggaattcgtagtgatggtatggtaaattatggggactccgtgaagggccgattcaccatctccggagataacgccaagagcacggtgtatctgcagatgaacagcctgaaacctgaggacacagccgactattattgttattctcaatccctcagtagtgctaattacggccaagtcttctggggccaggggacccaggtcaccgtctcctca

SEQ ID NO: 3643 - DNA, 360 bp, synthetic construct
  source 1..360: mol_type = other DNA
gaggtgcagctggtggagtctgggggagacttggtgcaggctggggggtctctgagactctcctgtgcagcctctggaagcatcgtcagtacgaatggcatgggatggcaccgccaggttccagggaagggccgcgagttggtcgcaggtattcgtagtgatggatttacaaactatgcggactccgtgaagggccgattcaccatctccagcgataacgtcaagaacacggtgtatctgcagatgaacagcctgaaagctgaggactcaggcgtctatttttgttattatcaagccctcagttctcctaagtccggccaaaccttctggggccaggggacccaggtcaccgtctcctca

SEQ ID NO: 3644 - DNA, 360 bp, synthetic construct
  source 1..360: mol_type = other DNA
gaggtgcagctggtggagtctgggggagacttggtgcaggctggggggtctctgagactctcctgtgcagcctctggaagcatcgtcagtacgaatggcatgggatggcaccgccaggttccagggaagggccgcgagttggtcgcaggtattcgtagtgatggatttacaaactatgcggactccgtgaagggccgattcaccatctccagcgataacgtcaagaacacggtgtatctgcagatgaacagcctgaaagctgaggactcaggcgtctatttttgttattatcaagccctcagttctcctaattccggccaacccttctggggccaggggacccaggtcaccgtctcctca

SEQ ID NO: 3645 - DNA, 360 bp, synthetic construct
  source 1..360: mol_type = other DNA
gaggtgcagctggtggagtctgggggagacttggtgcaggctggggggtctctgagactctcctgtgcagcctctggaagcatcgtcagtacgaatggcatgggatggcaccgccaggttccagggaagggccgcgagttggtcgcaggtattcgtagtgatggatttacaaactatgcggactccgtgaagggccgattcaccatctccagcgataacgtcaagaacacggtgtatctgcagatgaacagcctgaaagctgaggactcaggcgtctatttttgttattatcacgccctcagttctcctaattccggccaaaccttctggggccaggggacccaggtcaccgtctcctca

SEQ ID NO: 3646 - DNA, 360 bp, synthetic construct
  source 1..360: mol_type = other DNA
gaggtgcagctggtggagtctgggggagacttggtgcaggctggggggtctctgagactctcctgtgcagcctctggaagcatcgtcagtacgaatggcatgggatggcaccgccaggttccagggaagggccgcgagttggtcgcaggtattcgtagtgatggatttacaaactatgcggactccgtgaagggccgattcaccatctccagcgataacgtcaagaacacggtgtatctgcagatgaacagcctgaaagctgaggactcaggcgtctatttttgttattatcacgccctcagttctcctaattacggccaacccttctggggccaggggacccaggtcaccgtctcctca

SEQ ID NO: 3647 - DNA, 360 bp, synthetic construct
  source 1..360: mol_type = other DNA
gaggtgcagctggtggagtctgggggagacttggtgcaggctggggggtctctgagactctcctgtgcagcctctggaagcatcgtcagtacgaatggcatgggatggcaccgccaggttccagggaagggccgcgagttggtcgcaggtattcgtagtgatggatttacaaactatgcggactccgtgaagggccgattcaccatctccagcgataacgtcaagaacacggtgtatctgcagatgaacagcctgaaagctgaggactcaggcgtctatttttgttattatcaagccctcagttctcctacttccggccaaaccttctggggccaggggacccaggtcaccgtctcctca

SEQ ID NO: 3648 - DNA, 360 bp, synthetic construct
  source 1..360: mol_type = other DNA
gaggtgcagctggtggagtctgggggaggcttggtgcaggctggggggtctctgagagtctcctgtgcagcctctggaagcatcttcagggccgatgccatgggctggcaccgccaggttccagggaagccgcgcgagtttgtcgcgggtattcgtagtgatggatttaccaactatgcggaggccgtgaagggccgattcaccatctcctgggataccgtcaagaacacggtgtatctgcagatgaacagcctgaaacctgaggacacagccgtctatacttgttattatcactccctcagtagtcctaattccggtcaagtcttctggggccaggggacccaggtcaccgtctcctca

SEQ ID NO: 3649 - DNA, 360 bp, synthetic construct
  source 1..360: mol_type = other DNA
gaggtgcagctggtggagtctgggggagacttggtgcaggctggggggtctctgagactctcctgtgcagcctctggaagcatcgtcagtacgaatggcatgggatggcaccgccaggttccagggaagggccgcgagttggtcgcaggtattcgtagtgatggatttacaaactatgcggactccgtgaagggccgattcaccatctccagcgataacgtcaagaacacggtgtatctgcagatgaacagcctgaaagctgaggactcaggcgtctatttttgttattatcaagccctcagttctcctactgacggccaaaccttctggggccaggggacccaggtcaccgtctcctca

SEQ ID NO: 3650 - DNA, 360 bp, synthetic construct
  source 1..360: mol_type = other DNA
gaggtgcagctggtggagtctgggggagacttggtgcaggctggggggtctctgagactctcctgtgcagcctctggaagcatcgtcagtacgaatggcatgggatggcaccgccaggttccagggaagggccgcgagttggtcgcaggtattcgtagtgatggatttacaaactatgcggactccgtgaagggccgattcaccatctccagcgataacgtcaagaacacggtgtatctgcagatgaacagcctgaaagctgaggactcaggcgtctatttttgttattatcaagcccacagttctcctaattccggccaaaccttctggggccaggggacccaggtcaccgtctcctca

SEQ ID NO: 3651 - DNA, 360 bp, synthetic construct
  source 1..360: mol_type = other DNA
gaggtgcagctggtggagtctgggggagacttggtgcaggctggggggtctctgagactctcctgtgcagcctctggaagcatcgtcagtacgaatggcatgggatggcaccgccaggttccagggaagggccgcgagttggtcgcaggtattcgtagtgatggatttacaaactatgcggactccgtgaagggccgattcaccatctccagcgataacgtcaagaacacggtgtatctgcagatgaacagcctgaaagctgaggactcaggcgtctatttttgttattatcaagccctcagttctcctaattccggccacaccttctggggccaggggacccaggtcaccgtctcctca

SEQ ID NO: 3652 - DNA, 360 bp, synthetic construct
  source 1..360: mol_type = other DNA
gaggtgcagctggtggagtctgggggagacttggtgcaggctggggggtctctgagactctcctgtgcagcctctggaagcatcgtcagtacgaatggcatgggatggcaccgccaggttccagggaagggccgcgagttggtcgcaggtattcgtagtgatggatttacaaactatgcggactccgtgaagggccgattcaccatctccagcgataacgtcaagaacacggtgtatctgcagatgaacagcctgaaagctgaggactcaggcgtctatttttgttattatcaagccctcagttctcctcattccggccaaaccttctggggccaggggacccaggtcaccgtctcctca

SEQ ID NO: 3653 - DNA, 360 bp, synthetic construct
  source 1..360: mol_type = other DNA
gaggtgcagctggtggagtctgggggagacttggtgcaggctggggggtctctgagactctcctgtgcagcctctggaagcatcgtcagtacgaatggcatgggatggcaccgccaggttccagggaagggccgcgagttggtcgcaggtattcgtagtgatggatttacaaactatgcggactccgtgaagggccgattcaccatctccagcgataacgtcaagaacacggtgtatctgcagatgaacagcctgaaagctgaggactcaggcgtctatttttgttattatcaagccctcagttctcctaattccggccaaacctactggggccaggggacccaggtcaccgtctcctca

SEQ ID NO: 3654 - DNA, 360 bp, synthetic construct
  source 1..360: mol_type = other DNA
gaggtgcagctggtggagtctgggggagacttggtgcaggctggggggtctctgagactctcctgtgcagcctctggaagcatcgtcagtacgaatggcatgggatggcaccgccaggttccagggaagggccgcgagttggtcgcaggtattcgtagtgatggatttacaaactatgcggactccgtgaagggccgattcaccatctccagcgataacgtcaagaacacggtgtatctgcagatgaacagcctgaaagctgaggactcaggcgtctatttttgttattatcaagccctcagttctcctaagtacggccaacccttctggggccaggggacccaggtcaccgtctcctca

SEQ ID NO: 3655 - DNA, 360 bp, synthetic construct
  source 1..360: mol_type = other DNA
gaggtgcagctggtggagtctgggggagacttggtgcaggctggggggtctctgagactctcctgtgcagcctctggaagcatcgtcagtacgaatggcatgggatggcaccgccaggttccagggaagggccgcgagttggtcgcaggtattcgtagtgatggatttacaaactatgcggactccgtgaagggccgattcaccatctccagcgataacgtcaagaacacggtgtatctgcagatgaacagcctaaaagctgaggactcaggcgtctatttttgttattatcaagccctcagttctcctaatgacggccacaccttctggggccaggggacccaggtcaccgtctcctca

SEQ ID NO: 3656 - DNA, 360 bp, synthetic construct
  source 1..360: mol_type = other DNA
gaggtgcagctggtggagtctgggggagacttggtgcaggctggggggtctctgagactctcctgtgcagcctctggaagcatcgtcagtacgaatggcatgggatggcaccgccaggttccagggaagggccgcgagttggtcgcaggtattcgtagtgatggatttacaaactatgcggactccgtgaagggccgattcaccatctccagcgataacgtcaagaacacggtgtatctgcagatgaacagcctgaaagctgaggactcaggcgtctatttttgttattatcaagccctcagttctcctaagtacggccacaccttctggggccaggggacccaggtcaccgtctcctca

SEQ ID NO: 3657 - DNA, 360 bp, synthetic construct
  source 1..360: mol_type = other DNA
gaggtgcagctggtggagtctgggggagacttggtgcaggctggggggtctctgagactctcctgtgcagcctctggaagcatcgtcagtacgaatggcatgggatggcaccgccaggttccagggaagggccgcgagttggtcgcaggtattcgtagtgatggatttacaaactatgcggactccgtgaagggccgattcaccatctccagcgataacgtcaagaacacggtgtatctgcagatgaacagcctgaaagctgaggactcaggcgtctatttttgttattatcaagccctcagttctcctaagtacggccaaacctactggggccaggggacccaggtcaccgtctcctca

SEQ ID NO: 3658 - DNA, 360 bp, synthetic construct
  source 1..360: mol_type = other DNA
gaggtgcagctggtggagtctgggggagacttggtgcaggctggggggtctctgagactctcctgtgcagcctctggaagcatcgtcagtacgaatggcatgggatggcaccgccaggttccagggaagggccgcgagttggtcgcaggtattcgtagtgatggatttacaaactatgcggactccgtgaagggccgattcaccatctccagcgataacgacaagaacacggtgtatctgcagatgaacagcctgaaagctgaggactcaggcgtctatttttgttattatcaagccctcagttctcctaattacagccgaaccttctggggccaggggacccaggtcaccgtctcctca

SEQ ID NO: 3659 - DNA, 360 bp, synthetic construct
  source 1..360: mol_type = other DNA
gaggtgcagctggtggagtctgggggaggctcggtgcaggctggggggtctctgaggctctcctgtgcagcctctggaagcatcttcagtctcaatggcatgggctggtaccgccaggctccagggaagcagcgcgagttggtcgcaggaattcgtagtgatggactggtaaattatggggactccgtgaagggccgattcaccatctccggagataacgccaagagcactgtgtatctgcagatgaacggcctgaaacctgaggacacagccgactatgattgttattatcaatccttcagtggtgctgattacggccaagtcttctggggccaggggacccaggtcaccgtctcctca

SEQ ID NO: 3660 - DNA, 360 bp, synthetic construct
  source 1..360: mol_type = other DNA
gaggtgcagctggtggagtctgggggaggctcggtgcaggctggggggtctctgaggctctcctgtgcagcctctggaagcatctttagtctcaatggcatgggctggtaccgccaggctccagggaagcagcgcgagttggtcgcaggaattcgtagtaatgatatggcaaattatggggactccgtgaagggccgattcaccatctccggagataatgccaagagcacggtgtatctgcagatgaacagcctgaaacctgaggacacagccgactattattgttattatcaatccctcagtggtgctaattacggccaagtcttctggggccaggggaccctggtcaccgtctcctca

SEQ ID NO: 3661 - DNA, 360 bp, synthetic construct
  source 1..360: mol_type = other DNA
gaggtgcagctggtggagtctgggggaggctcggtgcaggctggggggtctctgaggctctcctgtgcagcctctggaagcatcttcagtctcaatggcatgggctggtaccgccaggctccagggaagcagcgcgagttggtcgcaggaattcgtagtgatggactggtaaattatggggactccgtgaagggccgattcaccatctccggagataacgccaagagcactgtgtatctgcagatgaacggcctgaaacccgaggacacagccgactatgattgttattatcaatccttcagtagtgctaattacggccaaacgatctggggccaggggacccaggtcaccgtctcctca

SEQ ID NO: 3662 - DNA, 360 bp, synthetic construct
  source 1..360: mol_type = other DNA
gaggtgcagctggtggagtctgggggaggctcggtgcaggctggggggtctctgaggctctcctgtgcagcctctggaagcatcttcagtctcaatgccatgggctggtaccgccaggctccagggaagcagcgcgagttggtcgcaggaattcgtagtaatggtatggcaaattatggggactccgtgaagggccgattcaccatctccggagataacgccaagagcacggtgtatctgcagatgaacagcctgaaacctgaggacacagccgactattattgttattatcaatccttcagtagtgataattacggccaaaccttctggggccaggggacccaggtcaccgtctcctca

SEQ ID NO: 3663 - DNA, 360 bp, synthetic construct
  source 1..360: mol_type = other DNA
gaggtgcagctggtggagtctgggggaggctcggtgcaggctggggggtctctgaggctctcctgtgcagcctctggaagcatcttcagtctcaatggcatgggctggtaccgccaggctccagggaagcagcgcgagttggtcgcaggaattcgtagtgatggactggtaaattatggggactccgtgaagggccgattcaccatctccggagataacgccaagagcactgtgtatctgcagatgaacggcctgaaacctgaggacacagccgactatgattgttattatcaatccttcagtactcctaatttcggtcaaacgttctggggccaggggacccaggtcaccgtctcctca

SEQ ID NO: 3664 - DNA, 360 bp, synthetic construct
  source 1..360: mol_type = other DNA
gaggtgcagctggtggagtctgggggaggctcggtgcaggctggggggtctctgaggctctcctgtgcagcctctggaagcatcttcagtctcaatggcatgggctggtaccgccaggctccagggaagcagcgcgagttggtcgcaggaattcgtagtgatggactggtaaattatggggactccgtgaagggccgattcaccatctccggagataacgccaagagcactgtgtatctgcagatgaacggcctgaaacctgaggacacagccgactatgattgttattatcaatccttcagtactcctaatttcggccaaacgatctggggccaggggacccaggtcaccgtctcctca

SEQ ID NO: 3665 - DNA, 369 bp, synthetic construct; identical to SEQ ID NO: 50
  source 1..369: mol_type = other DNA

SEQ ID NO: 3666 - DNA, 369 bp, synthetic construct
  source 1..369: mol_type = other DNA
gaggtccagctggtggagtctgggggaggcttggtgcagcctgggggttctctgagactctcctgtgcagcctctggattcacttttgatggtattgccatgacctgggtccgacaggctccagggaaggggctggagtgggtgtccagtatttatagttacgggccaaacacatactatgcagactccgtgaagggccgattcaccatctccacagacagcgccaagaacacactgtatctgcaaatgaacagcctgaaacctgaggacacggccgtgtattactgtgcagcagattcagacctaagtacagtagtagttggtccccatgactactggggccaggggacccaggtcaccgtctcctca

SEQ ID NO: 3667 - DNA, 369 bp, synthetic construct
  source 1..369: mol_type = other DNA
gaggtgcagctggtggagtctgggggaggcttggcgcagcctgggggttctctgagactctcctgtgcagcctctggattcacttttgatgatattgccatgacctgggtccgacaggctccagggaaggggctggagtgggtgtccagtatttatagttacgggccaaacacatactatgcagactccgtgaagggccgattcaccatctccacagacagcgccaagaacacactgtatctgcagatgaacagcctgaaacctgaggacacggccgtgtattactgtgcagcagattcagacctaagtacagtagtagttggtccccatgactactggggccaggggacccaggtcaccgtctcctca

SEQ ID NO: 3668 - DNA, 369 bp, synthetic construct
  source 1..369: mol_type = other DNA
gaggtgcagctggtggagtctgggggaggcttggtgcagcctgggggttctctgagactctcctgtgcagcctctggattcacttttgatgatattgccatgacctgggtccgacaggctccagggaaggggctggagtgggtgtccagtatttatagttacgggccaaacacatactatgcagactccgtgaagggccgattcaccatctccacagacagcgccaagaacacactgtatctgcaaatgaacagcctgaaacctgaggacacggccgtgtattactgtgcagcagattcagacctacgtacagtaggagttggtccccatgactactggggccaggggacccaggtcaccgtctcctca

SEQ ID NO: 3669 - DNA, 369 bp, synthetic construct
  source 1..369: mol_type = other DNA
gaggtgcagctggtggagtctgggggaggcttggtgcagcctgggggttctctgagactctcctgtgcagcctctggattcacttttgatgatattgccatgacctgggtccgacaggctccagggaaggggctggagtgggtgtccagtatttatagttacgggccaaacacatactatgcagactccgtgaagggccgattcaccatctccacagacagcgccaagaacacactgtatctgcaaatgaacagcctgaaacctgaggacacggccgtgtattactgtgcagcagagtcagacctacgtacagtagtagttggtccccatgactactggggccaggggacccaggtcaccgtctcctca

SEQ ID NO: 3670 - DNA, 369 bp, synthetic construct
  source 1..369: mol_type = other DNA
gaggtgcagctggtggagtctgggggaggcttggtgcagcctgggggttctctgagactctcctgtgcagcctctggattcacttttgatgatattgccatgacctgggtccgacaggctccagggaaggggctggagtgggtgtccagtatttatagttacgggccaaacacatactatgcagactccgtgaagggccgattcaccatctccacagacagcgccaagaacacactgtatctgcaaatgaacagcctgaaacctgaggacacggccgtgtattactgtgcagcagattcagacctacgtacaggagtagttggtccccatgactactggggccaggggacccaggtcaccgtctcctca

SEQ ID NO: 3671 - DNA, 369 bp, synthetic construct
  source 1..369: mol_type = other DNA
gaggtgcagctggtggagtctgggggaggcttggtgcagcctgggggttctctgagactctcctgtgcagcctctggattcacttttgatgatattgccatgacctgggtccgacaggctccagggaaggggctggagtgggtgtccagtatttatagttacgggccaaacacatactatgcagactccgtgaagggccgattcaccatctccacagacagcgccaagaacacactgtatctgcaaatgaacagcctgaaacctgaggacacggccgtgtattactgtgcagcagattcagacctacgtacagtagtagttggtccccatgactcctggggccaggggacccaggtcaccgtctcctca

SEQ ID NO: 3672 - DNA, 369 bp, synthetic construct
  source 1..369: mol_type = other DNA
gaggtgcagctggtggagtctgggggaggcttggtgcagcctgggggttctctgagactctcctgtgcagcctctggattcacttttgatgatattgccatgacctgggtccgacaggctccagggaaggggctggagtgggtgtccagtatttatagttacgggccaaacacatactatgcagactccgtgaagggccgattcaccatctccacagacagcgccaagaacacactgtatctgcaaatgaacagcctgaaacctgaggacacggccgtgtattactgtgtagcagattcagacctaagtacagtagtagatggtccccatgactactggggccaggggacccaggtcaccgtctcctca

SEQ ID NO: 3673 - DNA, 369 bp, synthetic construct
  source 1..369: mol_type = other DNA
gaggtgcagctggtggagtctgggggaggcttggtgcagcctgggggttctctgagactctcctgtgcagcctctggattcactttagatgattatgccatgagctgggtccgacaggctccagggaaggggctggagtgggtgtccactatttttagttacagtagtaacacatactatgcagactccgtgaagggccgattcaccatctccacagacaacgccaagaacacactgtatctgcaaatgaacagcctgaaacctgaggacacggccgtgtattactgtgcagcagattcagacctaagtacagtagtagttggtccccatgactactggggccaggggacccaggtcaccgtctcctca

SEQ ID NO: 3674 - DNA, 369 bp, synthetic construct
  source 1..369: mol_type = other DNA
gaggtgcagctggtggagtctgggggaggcttggtgcagcctgggggttctctgagactctcctgtgcagcctctggattcactttagatgattatgccatgagctgggtccgacaggctccagggaaggggctggagtgggtgtccactatttttagttacagtagtaacacatactatgcagactccgtgaagggccgattcaccatctccacagacagcgccaagaacacactgtatctgcaaatgaacagcctgaaacctgaggacacggccgtgtattactgtgcagcagattcagacctaagtacagtagtagttggtccccatgactactggggccaggggacccaggtcaccgtctcctca

SEQ ID NO: 3675 - DNA, 375 bp, synthetic construct
  source 1..375: mol_type = other DNA
gaggtgcagctggtggagtctgggggaggcttggcgcagcctggggggtctctgagactctcctgtcaagcctctggattcaccttcagtggctatgccatgagctgggcccgccaggctccaggaaaggggctcgagtgggtgtccggtatttatagtgatggtagtgaaacatactatgcagactccgtgaagggccgattcaccatctccagagacaatgccaagaacacggtgtatctgcaaatgagcagcctgaaatctgaggacacggcaacgtattactgtgcaaaagacgcggggagttggggtaggggtccctttggctttgactatgactactggggccaggggacccaggtcaccgtctcctca

SEQ ID NO: 3676 - DNA, 375 bp, synthetic construct
  source 1..375: mol_type = other DNA
gaggtgcagctggtggagtctgggggaggcttggcgcagcctggggggtctctgagactctcctgtgcagcctctggattcaccttcagtagctatgccatgagctgggcccgccaggctccaggaaaggggctcgagtgggtgtccggtatttctagtgatggtagtgacacatactatgcagactccgtgaagggccgattcaccatctccagagacaacgccaagaacacggtgtatctgcaaatgaacagcctgaaacctgaggacacggcactgtatgtctgtgcaaaagacgcggggagttggggtacgggtccctttggctatgagtatgactactggggccaggggacccaggtcaccgtctcctca

SEQ ID NO: 3677 - DNA, 375 bp, synthetic construct; identical to SEQ ID NO: 51
  source 1..375: mol_type = other DNA

SEQ ID NO: 3678 - DNA, 375 bp, synthetic construct
  source 1..375: mol_type = other DNA
gaggtgcagctggtggagtctgggggaggcttggtgcagcctggggggtctctgagactctcctgtgcagcctctggattcaccttcagtagctatgccatgagctgggcccgccaggctccaggaaaggggctcgagtgggtgtccggtatttctagtgatggtagtgacacatactatgcagactccgtgaagggccgattcaccatctccagagacaacgccaagaacacggtgtatctgcaaatgaacagcctgaaacctgaggacacggcactgtatgtctgtgcaaaagacgcggggagttggggtacgggtccctttggctatgagtatgactactggggccaggggacccaggtcaccgtctcctca

SEQ ID NO: 3679 - DNA, 375 bp, synthetic construct
  source 1..375: mol_type = other DNA
gaggtgcagctggtggagtctggaggaggcttggcgcagcctggggggtctctgagactctcctgtcaagcctctggattcaccttcagtggctatgccatgagctgggcccgccaggctccaggaagggggctcgagtgggtgtccggtatttatagtgatggtagtgaaacatactatgcagactccgtgaagggccgattcaccatctccagagacaatgccaagaacacggtgtatctgcaaatgagcagcctgaaatctgaggacacggcaacgtattactgtgcaaaagacgcggggagttggggtaggggtccctttggctttgactatgactactggggccaggggacccaggtcaccgtctcctca

SEQ ID NO: 3680 - DNA, 375 bp, synthetic construct
  source 1..375: mol_type = other DNA
gaggtgcagctggtggagtctgggggaggcttggtgcagcctggggggtctctgagactttcctgtcaagcctctggattcaccttcagtggctatgccatgagctgggcccgccaggctccaggaaaggggctcgagtgggtgtccggtatttatagtgatggtagtgaaacatactatgcagactccgtgaagggccgattcaccatctccagagacaatgccaagaacacggtgtatctgcaaatgagcagcctgaaatctgaggacacggcaacgtattactgtgcaaaagacgcggggagttggggtaggggtccctttggctttgactatgactactggggccaggggacccaggtcaccgtctcctca

SEQ ID NO: 3681 - DNA, 375 bp, synthetic construct
  source 1..375: mol_type = other DNA
gaggtgcagctggtggagtctgggggaggcttggcgcagcctggggggtctctgagactctcctgtcaagcctctggattcaccttcagtggctatgccatgggctgggcccgccaggctccaggaaaggggctcgagtgggtgtccggtatttatagtgatggtagtgaaacatactatgcagactccgtgaagggccgattcaccatctccagagacaacgccaagaacacggtgtatctgcaaatgagcagcctgaaatctgaggacacggcaacgtattactgtgcaaaagacgcggggagttggggtaggggtccctttggctttgactatgactactggggccaggggacccaggtcaccgtctcctca

SEQ ID NO: 3682 - DNA, 375 bp, synthetic construct
  source 1..375: mol_type = other DNA
gaggtgcagctggtggagtctgggggaggcttggcgcagcctggggggtctctgagactctcctgtcaagcctctgggttcaccttcagtggctatgccatgagctgggcccgccaggctccaggaaaggggctcgagtgggtgtccggtatttatagtgatggtagtgaaacatactatgcagactccgtgaagggccgattcaccatctccagagacaacgccaagaacacggtgtatctgcaaatgagcggcctgaaatctgaggacacggcaacgtattactgtgcaaaagacgcggggagttggggtaggggtccctttggctttgactatgactactggggccaggggacccaggtcaccgtctcctca

SEQ ID NO: 3683 - DNA, 375 bp, synthetic construct
  source 1..375: mol_type = other DNA
gaggtgcagctggtggagtctgggggaggcttggtgcagcctggggggtctctgagactctcctgtgcagcctctggattcaccttcagtcgctatgccatgagctgggcccgccaggctccaggaaaggggctcgagtgggtgtccggtatttctgatgatggcagtgacacatactatgcagactccgtgaagggccgattcaccatctccagagacaacgccaagaacacggtgtatctgcaaatgaacagcctgaaacctgaggacacggcactgtattactgtgcaaaagacgcggggagttggggtacgggtccctttggctatgagtatgactactggggccaggggacccaggtcaccgtctcctca

SEQ ID NO: 3684 - DNA, 375 bp, synthetic construct
  source 1..375: mol_type = other DNA
gaggtgcagctggtggagtctgggggaggcttggcgcagcctggggggtctctgagactctcctgtgcagcctctggattcaccttcagtagctatgccatgagctgggcccgccaggctccaggaaaggggctcgagtgggtgtccggtatttctagtgatggtagtgacacatactatgcagactccgtgaagggccgattcaccatctccagagacaacgccaagaacacggtgtatctgcaaatgaacagcctgaaacctgaggacacggcactgtatgtctgtgcaaacgacgcggggggttggggtacgggtccctttggctatgagtatgactactggggccaggggacccaggtcaccgtctcctca

SEQ ID NO: 3685 - DNA, 375 bp, synthetic construct
  source 1..375: mol_type = other DNA
gaggtgcagctggtggagtctgggggaggcttggcgcagcctggggggtctctgagactctcctgtgcagcctctggattcaccttcagtagctatgccatgagctgggcccgccaggctccaggaaaggggctcgagtgggtgtccggtatttctagtgatggtagtgacacatactatgcagactccgtgaagggccgattcaccatctccagagacaacgccaagaacacggtgtatctgcaaatgaacagcctgaaacctgaggacacggcactgtatgtctgtgcaaaagccgcggggggttggggtacgggtccctttggctatgagtatgactactggggccaggggacccaggtcaccgtctcctca

SEQ ID NO: 3686 - DNA, 354 bp, synthetic construct
  source 1..354: mol_type = other DNA
gaggtgcagctggtggagtctgggggaggattggtgcaggctgggggctctctgagactctcctgtgcagcctctggacgcacctttagtgactatggcatgggctggttccgccaggctccagggaaggaacaagaatttgtagcgactattaactggagtaatggtcgcacatactatgcagactccgtgaagggccgattcaccatctccagagacaacgccaagaacacggggtatctggaaatgagcagcctgaaagttgaggacacggccgtttattactgtgcaacaacaccctccggaaaggcgtatagctactggggccaggggacccaggtcaccgtctcctca

SEQ ID NO: 3687 - DNA, 354 bp, synthetic construct
  source 1..354: mol_type = other DNA
gaggtgcagctggtggagtctgggggaggattggtgcaggctgggggctctctgagactctcttgtgcagcctctggacgcacctttagtgactatggcatgggctggttccgccaggctccagggaaggatagtgagtttgtagcggcgattaactggagtaatggtcgcacaaactatgcagactccgtgaagggccgattcaccatctccagagacaacgccaagaacacggggtatctggaaatgaacagcctgaaagttgaggacacggccgtctattactgtgcaacaaccccctccggaaaggcgtatagctactggggccaggggacccaggtcaccgtctcctca

SEQ ID NO: 3688 - DNA, 354 bp, synthetic construct
  source 1..354: mol_type = other DNA
gaggtgcagctggtggagtctgggggaggattggtgcaggctgggggctctctgagactctcctgtgcagcctctggacgcacctttagtgactatggcatgggctggttccgccaggctccagggaaggacagtgagtttgtagcgactattaactggagtaatggtcgcacaagctatgcagactccgtgaagggccgattcaccatctccagagacaacgccaagaacacggggtatctggaaatgaacagcctgaaagttgaggacacggccgtttattactgtgcaggaaccccctccggaaaggcgtataccaactggggccaggggacccaggtcaccgtctcctca

SEQ ID NO: 3689 - DNA, 354 bp, synthetic construct
  source 1..354: mol_type = other DNA
gaggtgcagctggtggagtctgggggaggattggtgcaggctgggggctctctgagactctcctgtgcagcctctggacgcacctttagtgactatggcatgggctggttccgccaggctccagggaaggatagtgagtttgtagcggcgattaactggagtaatggtcgcacaaactatgcagactccgtgaagggccgattcaccatctccagagacaacgccaagaacacggggtatctggaaatgaacagcctgaaagttgaggacacggccgtttattactgtgcagtaaccccctccggaaaggcgtatagctactggggccaggggacccaggtcaccgtctcctca

SEQ ID NO: 3690 - DNA, 354 bp, synthetic construct
  source 1..354: mol_type = other DNA
gaggtgcagctggtggagtctgggggaggattggtgcaggctgggggctctctgagactctcctgtgcagcctctggacgcacctttagtgactatggcatgggctggttccgccaggctccagggaaggagcgtgagtttgtagcgactattaactggagtaatggtcgcacatactatgcagactccgtgaagggccgattcaccatctccagagacaacgccaagaacacggggtatctggaaatgaacagcctgaaagttgaggacacggccgtttatttctgtgcagcaaccccctccggaaaggcgtttacctactggggccaggggacccaggtcaccgtctcctca

SEQ ID NO: 3691 - DNA, 354 bp, synthetic construct
  source 1..354: mol_type = other DNA
gaggtgcagctggtggagtctgggggaggattggtgcaggctgggggctctctgagactctcctgtgcagcctctggacgcacctttagtgactatggcatgggctggttccgccaggctccagggaaggagcgtgagtttgtagcgactattaactggagtaatggtcgcacaacctatgcagactccgtgaagggccgattcaccatctccagagacaacgccgagaacacggggtatctggaaatgaacagcctgaaagttgaggacacggccctttattactgtgcagcaaccccctccggaaaggcgtttacctactggggccaggggacccaggtcaccgtctcctca

SEQ ID NO: 3692 - DNA, 354 bp, synthetic construct
  source 1..354: mol_type = other DNA
gaggtgcagctggtggagtctgggggaggattggtgcaggctgggggctctctgagactctcctgtgcagcctctggacgcacctttagtgactatggcatgggctggttccgccaggctccagggaaggaacaagaatttgtagcgactattaactggagtaatggtcgcacatactatgcagactccgtgaagggccgattcaccatctccagagacaacgccaagaacacggggtatctggaaatgaacagcctgaaagttgaggacacggccgtttattactgtgcagcaacacccaccggaaaggcgtatagctactggggccaggggacccaggtcaccgtctcctca

SEQ ID NO: 3693 - DNA, 354 bp, synthetic construct
  source 1..354: mol_type = other DNA
gaggtgcagctggtggagtctgggggaggattggtgcaggctgggggctctctgagactctcctgtgcagcctctggacgcacctttagtgactatggcatgggctggttccgccaggctccagggaaggagcgtgagtttgtagcgactattaactggagtaatggtcgcacaacctatgcagactccgtgaagggccgattcaccatctccagagacaacgccgagaacacggggtatctggaaatgaacagcctgaaagttgaggacacggccctttattactgtgcagcaaccccctccggaaaggcgtatacctactggggccaggggacccaggtcaccgtctcctca

SEQ ID NO: 3694 - DNA, 354 bp, synthetic construct
  source 1..354: mol_type = other DNA
gaggtgcagctggtggagtctgggggaggattggtgcaggctgggggctctctgagactctcctgtgcagcctctggacgcacctttagtgactatggcatgggctggttccgccaggctccagggaaggagcgtgagtttgtagcgactattaactggagtaatggtcgcacaacctatgcagactccgtgaagggccgattcaccatctccagagacaacgccgagaacacggggtatctggaaatgaacagcctgaaagttgaggacacggccctttattactgtgcagcaacccccaccggaaaggcgtatacctactggggccaggggacccaggtcaccgtctcctca

SEQ ID NO: 3695 - DNA, 354 bp, synthetic construct
  source 1..354: mol_type = other DNA
gaggtgcagctggtggagtctgggggaggattggtgcaggctgggggctctctgagactctcctgtgcagcctctggacgcacctttagtgactatggcatgggctggttccgccaggctccagggaaggagcgtgagtttgtagcgactattaactggagtaatggtcgcacaacctatgcagactccgtgaagggccgattcaccatctccagagacaacgccgagaacacggggtatctggaaatgaacagcctgaaagttgaggacacggccctttattactgtgcagcaacccccgccggaaaggcgtatacctactggggccaggggacccaggtcaccgtctcctca

SEQ ID NO: 3696 - DNA, 354 bp, synthetic construct
  source 1..354: mol_type = other DNA
gaggtgcagctggtggagtctgggggaggattggtgcaggctgggggctctctgagactctcctgtgcagcctctggacgcacctttagtgactatggcatgggctggttccgccaggctcccgggaaggagcgtgagtttgtagcgactattaactggagtaatggtcgcacaacctatgcagactccgtgaagggccgattcaccatctccagagacaccgccgagaacacggggtatctggaaatgaacagcctgaaagttgaggacacggccctttattactgtgcagcaacccccgccggaaaggcgtatacctactggggccaggggacccaggtcaccgtctcctca

SEQ ID NO: 3697 - DNA, 354 bp, synthetic construct
  source 1..354: mol_type = other DNA
gaggtgcagctggtggagtctgggggaggattggtgcaggctgggggctctctgagactctcctgtgcagcctctggacgcacctttagtgactatggaatgggctggttccgccaggctccagggaaggagcatgagtttgtagcgagtattaactggagtaatggtcgcacatcatatgcagactccgcgaagggccggttcaccatctccagagacaacgccaagaacacggggtatctggaaatgaacagcctgaaagttgaggacacggccgtttattactgtgcaggaaccctctccggaaaggcgtatacctactggggccaggggacccaggtcaccgtctcctca

SEQ ID NO: 3698 - DNA, 354 bp, synthetic construct
  source 1..354: mol_type = other DNA
gaggtgcagctggtggagtctgggggaggattggtgcaggctgggggctccctgagactctcctgtgcagcctctggacgcacctttagtgactatggcatgggctggttccgccaggctccagggaaggagcgtgagtttgtagcgactattaactggagtaatggtcgcacaacctatgcagactccgtgaagggccgattcaccatctccagagacaacgccgagaacacggggtatctggaaatgaacagcctgaaagttgaggacacggccctttattactgtgcagcaaccccctccggaaaggcgtattcaaactggggccaggggacccaggtcaccgtctcctca

SEQ ID NO: 3699 - DNA, 354 bp, synthetic construct
  source 1..354: mol_type = other DNA
gaggtgcagctggtggagtctgggggaggattggtgcaggctgggggctctctgagactctcctgtgcagcctctggacgcacctttagtgactatggcatgggctggttccgccaggctccagggaaggagcgtgagtttgtagcgactattaactggagtaatggtcgcacaacctatgcagactccgtgaagggccgattcaccatctccagagacaacgccgagaacacggggtatctggaaatgaacagcctgaaagttgaggacacggccctttattactgtgcagcaaccccctccggaagggcgtatacctactggggccaggggacccaggtcaccgtctcctca

SEQ ID NO: 3700 - DNA, 354 bp, synthetic construct
  source 1..354: mol_type = other DNA
gaggtgcagctggtggagtctgggggaggattggtgcaggctgggggctctctgagactctcctgtgcagcctctggacgcacctttagtgactatggcatgggctggttccgccaggctccagggaaggagcgtgagtttgtagcgactattaactggagtaatggtcgcacaacctatgcagactccgtgaagggccgattcaccatctccagagacaacgccgagaacacggggtatctggaaatgaacagcctgaaagttgaggacacggccctttattactgtgcagcaaacccctccggaaaggcgtatacctactggggccaggggacccaggtcaccgtctcctca

SEQ ID NO: 3701 - DNA, 354 bp, synthetic construct
  source 1..354: mol_type = other DNA
gaggtgcagctggtggagtctgggggaggattggtgcaggctgggggctctctgagactctcctgtgcagcctctggacgcacctttagtgactatggcatgggctggttccgccaggctccagggaaggagcgtgagtttgtagcgactattaactggagtaatggtcgcacaacctatgcagactccgtgaagggccgattcaccatctccagagacaacgccgagaacacggggtatctggaaatgaacagcctgaaagttgaggacacggccctttattactgtgcagcaaccccctccgcaaaggcgtatacctactggggccaggggacccaggtcaccgtctcctca

SEQ ID NO: 3702 - DNA, 354 bp, synthetic construct
  source 1..354: mol_type = other DNA
gaggtgcagctggtggagtctgggggaggattggtgcaggctgggggctctctgagactctcctgtgcagcctctggacgcacctttagtgactatggcatgggctggttccgccaggctccagggaaggagcgtgagtttgtagcgactattaactggagtaatggtcgcacaacctatgcagactccgtgaagggccgattcaccatctccagagacaacgccgagaacacggggtatctggaaatgaacagcctgaaagttgaggacacggccctttattactgtgcagcaaccccctccggaaaggcggatacctactggggccaggggacccaggtcaccgtctcctca

SEQ ID NO: 3703 - DNA, 354 bp, synthetic construct
  source 1..354: mol_type = other DNA
gaggtgcagctggtggagtctgggggaggattggtgcaggctgggggctctctgagactctcctgtgcagcctctggacgcacctttagtgactatggcatgggctggttccgccaggctccagggaaggagcgtgagtttgtagcgactattaactggagtaatggtcgcacaacctatgcagactccgtgaagggccgattcaccatctccagagacaacgccgagaacacggggtatctggaaatgaacagcctgaaagttgaggacacggccctttattactgtgcagcaaccccctccggaaaggcgaatacctactggggccaggggacccaggtcaccgtctcctca

SEQ ID NO: 3704 - DNA, 354 bp, synthetic construct
  source 1..354: mol_type = other DNA
gaggtgcagctggtggagtctgggggaggattggtgcaggctgggggctctctgagactctcctgtgcagcctctggacgcacctttagtgactatggcatgggctggttccgccaggctccagggaaggagcgtgagtttgtagcgactattaactggagtaatggtcgcacaacctatgcagactccgtgaagggccgattcaccatctccagagacaacgccgagaacacggggtatctggaaatgaacagcctgaaagttgaggacacggccctttattactgtgcagcaaccccctccgggagagcgtttacctactggggccaggggacccaggtcaccgtctcctca

SEQ ID NO: 3705 - DNA, 354 bp, synthetic construct
  source 1..354: mol_type = other DNA
gaggtgcagctggtggagtctgggggaggattggtgcaggctgggggctctctgagactctcctgtgcagcctctggacgcacctttagtgactatggcatgggctggttccgccaggctccagggaaggagcgtgagtttgtagcgactattaactggagtaatggtcgcacaacctatgcagactccgtgaagggccgattcaccatctccagagacaacgccgagaacacggggtatctggaaatgaacagcctgaaagttgaggacacggccctttattactgtgcagcaaccacctccggaaaggcgtatacctactggggccaggggacccaggtcaccgtctcctca

SEQ ID NO: 3706 - DNA, 354 bp, synthetic construct
  source 1..354: mol_type = other DNA
gaggtgcagctggtggagtctgggggaggattggtgcaggctgggggctctctgagactctcctgtgcagcctctggacgcacctttagtgactatggcatgggctggttccgccaggctccagggaaggagcgtgagtttgtagcgactattaactggagtaatggtcgcacaacctatgcagactccgtgaagggccgattcaccatctccagggacaacgccgagaacacggggtatctggaaatgaacagcctgaaagttgaggacacggccctttattactgtgcagcaaccccctccggacaggcgtatacctactggggccaggggacccaggtcaccgtctcctca

SEQ ID NO: 3707 - DNA, 354 bp, synthetic construct
  source 1..354: mol_type = other DNA
gaggtgcagctggtggagtctgggggaggattggtgcaggctgggggctctctgagactctcctgtgcagcctctggacgcacctttagtgactatggcatgggctggttccgccaggctccagggaaggagcgtgagtttgtagcgactattaactggagtaatggtcgcacaacctatgcagactccgtgaagggccgattcaccatctccagagacaccgccgagaacacggggtatctggaaatgaacagcctgaaagttgaggacacggccctttattactgtgcagcaaccccctccggacaggcgtatacctactggggccaggggacccaggtcaccgtctcctca

SEQ ID NO: 3708 - DNA, 354 bp, synthetic construct
  source 1..354: mol_type = other DNA
gaggtgcagctggtggagtctgggggaggattggtgcaggctgggggctctctgagactctcctgtgcagcctctggacgcacctttagtgactatggcatgggctggttccgccaggctccagggaaggagcgtgagtttgtagcgactattaactggagtaatggtcgcacaacctatgcagactccgtgaagggccgattcaccatctccagagacaacgccgagaacacggggtatctggaaatgaacagcctgaaagttgaggacacggccctttattactgtgcagcacccccctccggaaaggcgtatacctactggggccaggggacccaggtcaccgtctcctca

SEQ ID NO: 3709 - DNA, 354 bp, synthetic construct
  source 1..354: mol_type = other DNA
gaggtgcagctggtggagtctgggggaggattggtgcaggctgggggctctctgagactctcctgtgcagcctctggacgcacctttagtgactatggcatgggctggttccgccaggctccagggaaggagcgtgagtttgtagcgactattaactggagtaatggtcgcacaacctatgcagactccgtgaagggccgattcaccatctccagagacaacgccgagaacacggggtatctggaaatgaacagcctgaaagtcgaggacacggccctttattactgtgcagcaaccccctccggaaaggagtatacctactggggccaggggacccaggtcaccgtctcctca

SEQ ID NO: 3710 - DNA, 354 bp, synthetic construct
  source 1..354: mol_type = other DNA
gaggtgcagctggtggagtctgggggaggattggtgcaggctgggggctctctgagactctcctgtgcagcctctggacgcacctttagtgactatggcatgggctggttccgccaggctccagggaaggagcgtgagtttgtagcgactattaactggagtaatggtcgcacgacctatgcagactccgtgaagggccgattcaccatctccagagacaacgccgagaacacggtgtatctggaaatgaacagcctgaaagttgaggacacggccctttattactgtgcagcaaccccctccggaaaggagtatacctactggggccaggggacccaggtcaccgtctcctca

SEQ ID NO: 3711 - DNA, 354 bp, synthetic construct
  source 1..354: mol_type = other DNA
gaggtgcagctggtggagtctgggggaggattggtgcaggctgggggctctctgagactctcctgtgcagcctctggacgcacctttagtgactatggcatgggctggttccgccaggctccagggaaggagcgtgagtttgtagcgactattaactggagtaatggtcgcacaacctatgcagactccgtgaagggccgattcaccatctccagagacaacgccgagaacacggggtatctggaaatgaacagcctgaaagttgaggacacggccctttattactgtgcagcaaccccctccggaacggcgtatacctactggggccaggggacccaggtcaccgtctcctca

SEQ ID NO: 3712 - DNA, 354 bp, synthetic construct
  source 1..354: mol_type = other DNA
gaggtgcagctggtggagtctgggggaggattggtgcaggctgggggctctctgagactctcctgtgcagcctctggacgcacctttagtgactatggcatgggctggttccgccaggctccagggaaggagcgtgagtttgtagcgactattaactggagtaatggtcgcacaacctatgcagactccgtgaagggccgattcaccatctccagagacaacgccgagaacacggggtatctggaaatgaacagcctgaaagttgaggacacggccctttattactgtgcagcagccccctccggaaaggcgtatacctactggggccaggggacccaggtcaccgtctcctca

SEQ ID NO: 3713 - DNA, 354 bp, synthetic construct; identical to SEQ ID NO: 52
  source 1..354: mol_type = other DNA

SEQ ID NO: 3714 - DNA, 354 bp, synthetic construct
  source 1..354: mol_type = other DNA
gaggtgcagctggtggagtctgggggaggattggtgcaggctgggggctctctgagactctcctgtgcagcctctggacgcacctttagtgactatggcatgggctggttccgccgggctccagggaaggaacaagaatttgtagcgactattaactggagtaatggtcgcacatactatgcagactccgtgaagggccgattcaccatctccagagacaacgccaagaacacggggtatctggaaatgaacagcctgaaagttgaggacacggccgtttattactgtgcagcaacaccctccggaaaggcgtatagccactggggccaggggacccaggtcaccgtctcctca

SEQ ID NO: 3715 - DNA, 354 bp, synthetic construct
  source 1..354: mol_type = other DNA
gaggtgcagctggtggagtctgggggaggattggtgcaggctgggggctctctgagactctcctgtgcagcctctggacgcacctttagtgactatggcatgggctggttccgccaggctccagggaaggaacaagaatttgtagcgactattaactggagtaatggtcgcacatactatgcagactccgtgaagggccgattcaccatctccagagacaacgccaagaacgcggggtatctggaaatgaacagcctgaaagttgaggacacggccgtttattactgtgcagcaacaccctccggaaaggcgtatagcaactggggccaggggacccaggtcaccgtctcctca

SEQ ID NO: 3716 - DNA, 354 bp, synthetic construct
  source 1..354: mol_type = other DNA
gaggtgcagctggtggagtctgggggaggattggtgcaggctgggggctctctgagactctcctgtgcagcctctggacgcacctttagtgactatggcatgggctggttccgccaggctccagggaaggatagtgagtttgtagcggcgattaactggagtaatggtcgcacaaactatgcagactccgtgaagggccgattcaccatctccagagacaacgccaagaacacggggtatctggaaatgaacagcctgaaagttgaggacacggccgtttattactgtgcagcaacccccttcggaaaggcgtatagctactggggccaggggacccaggtcaccgtctcctca

SEQ ID NO: 3717 - DNA, 354 bp, synthetic construct
  source 1..354: mol_type = other DNA
gaggtgcagctggtggagtctgggggaggattggtgcaggctgggggctctctgagactctcctgtgcagcctctggacgcacctttagtgactatggcatgggctggttccgccaggctccagggaaggatagtgagtttgtagcggcgattaactggagtaatggtcgcacaaactatgcagactccgtgaagggccgattcaccatctccagagacaacgccaagaacacggggtatctggaaatgaacagcctgaaagttgaggacacggccgtttattactgtgcagcacccccctccggaaaggcgtatagctactggggccaggggacccaggtcaccgtctcctca

SEQ ID NO: 3718 - DNA, 354 bp, synthetic construct
  source 1..354: mol_type = other DNA
gaggtgcagctggtggagtctgggggaggattggtgcaggctgggggctctctgagactctcctgtgcagcctctggacgcacctttagtgactatggaatgggctggttccgccaggctccagggaaggagcatgagtttgtagcgagtattaactggagtaatggtcgcacatcatatgcagactccgcgaagggccggttcaccatctccagagacaacgccaagaacacggggtatctggaaatgaacagcctgaaagttgaggacacggccgtttattactgtgcaggaaccccctccggaaaggcgtatagctactggggccaggggacccaggtcaccgtctcctca

SEQ ID NO: 3719 - DNA, 354 bp, synthetic construct
  source 1..354: mol_type = other DNA
gaggtgcagctggtggagtctgggggaggattggtgcaggctgggggctctctgagactctcctgtgcagcctctggacgcacctttagtgactatggcatgggctggttccgccaggctccagggaaggagcgtgagtttgtagcgactattaactggagtaatggtcgcacaacctatgcagactccgtgaagggccgattcaccatctccagagacaacgccgagaacacggggtatctggaaatgaacagcctgaaagttgaggacacggccctttattactgtgcagcatccccctccggaaaggcgtatacctactggggccaggggacccaggtcaccgtctcctca

SEQ ID NO: 3720 - DNA, 354 bp, synthetic construct
  source 1..354: mol_type = other DNA
gaggtgcagctggtggagtctgggggaggattggtgcaggctgggggctctctgagactctcctgtgcagcctctggacgcacctttagtgactatggcatgggctggttccgccaggctccagggaaggagcgtgagtttgtagcgactattaactggagtaatggtcgcacaacctatgcagactccgtgaagggccgattcaccatctccagagacaacgccgagaacacggggtatctggaaatgaacagcctgaaagttgaggacacggccctttattactgtgcagcaacccactccggaaaggcgtatacctactggggccaggggacccaggtcaccgtctcctca

SEQ ID NO: 3721 - DNA, 354 bp, synthetic construct
  source 1..354: mol_type = other DNA
gaggtgcagctggtggagtctgggggaggattggtgcaggctgggggctctctgagactctcctgtgcagcctctggacgcacctttagtgactatggcatgggctggttccgccaggctccagggaaggagcgtgagtttgtagcgactattaactggagtaatggtcgcacaacctatgcagactccgtgaagggccgattcaccatctccagagacaacgccgagaacacggggtatctggaaatgaacagcctgaaagttgaggacacggccctttattactgtgcagcaaccccccccggaaaggcgtatacctactggggccaggggacccaggtcaccgtctcctca

SEQ ID NO: 3722 - DNA, 354 bp, synthetic construct
  source 1..354: mol_type = other DNA
gaggtgcagctggtggagtctgggggaggattggtgcaggctgggggctctctgagactctcctgtgcagcctctggacgcacctttagtgactatggcatgggctggttccgccaggctccagggaaggagcgtgagtttgtagcgactattaactggagtaatggtcgcacaacctatgcagactccgtgaagggccgattcaccatctccagagacaacgccgagaacacggggtatctggaaatgaacagcctgaaagttgaggacacggccctttattactgtgcagcaaccccctccggaaaggcgcatacctactggggccaggggacccaggtcaccgtctcctca

SEQ ID NO: 3723 - DNA, 354 bp, synthetic construct
  source 1..354: mol_type = other DNA
gaggtgcagctggtggagtctgggggaggattggtgcaggctgggggctctctgagactctcctgtgcagcctctggacgcacctttagtgactatggcatgggctggttccgccaggctccagggaaggagcgtgagtttgtagcgactattaactggagtaatggtcgcacaacctatgcagactccgtgaagggccgattcaccatctccagagacaacgccgagaacacggggtatctggaaatgaacagcctgaaagttgaggacacggccctttattactgtgcagcaaccccctccggaaagtcgtatacctactggggccaggggacccaggtcaccgtctcctca

SEQ ID NO: 3724 - DNA, 354 bp, synthetic construct
  source 1..354: mol_type = other DNA
gaggtgcagctggtggagtctgggggaggattggtgcaggctgggggctctctgagactctcctgtgcagcctctggacgcacctttagtgactatggcatgggctggttccgccaggctccagggaaggagcgtgagtttgtagcgactattaactggagtaatggtcgcacaacctatgcagactccgtgaagggccgattcaccatctccagagacaacgccgagaacacggggtatctggaaatgaacagcctgaaagttgaggacacggccctttattactgtgcagcaaccccctccggaaaggtgtatacctactggggccaggggacccaggtcaccgtctcctca

SEQ ID NO: 3725 - DNA, 354 bp, synthetic construct
  source 1..354: mol_type = other DNA
gaggtgcagctggtggagtctgggggaggattggtgcaggctgggggctctctgagactctcctgtgcagcctctggacgcacctttagtgactatggcatgggctggttccgccaggctccagggaaggagcgtgagtttgtagcgactattaactggagtaatggtcgcacaacctatgcagactccgtgaagggccgattcaccatctccagagacaacgccgagaacacggggtatctggaaatgaacagcctgaaagttgaggacacggccctttattactgtgcagcaaccccctccggaatggcgtatacctactggggccaggggacccaggtcaccgtctcctca

SEQ ID NO: 3726 - DNA, 354 bp, synthetic construct
  source 1..354: mol_type = other DNA
gaggtgcagctggtggagtctgggggaggattggtgcaggctgggggctctctgagactctcctgtgcagcctctggacgcacctttagtgactatggcatgggctggttccgccaggctccagggaaggagcgtgagtttgtagcgactattaactggagtaatggtcgcacaacctatgcagactccgtgaagggccgattcaccatctccagagacaacgccgagaacacggggtatctggaaatgaacagcctgaaagttgaggacacggccctttattactgtgcagcaaccccctccggaaatgcgtatacctactggggccaggggacccaggtcaccgtctcctca

SEQ ID NO: 3727 - DNA, 354 bp, synthetic construct
  source 1..354: mol_type = other DNA
gaggtgcagctggtggagtctgggggaggattggtgcaggctgggggctctctgagactctcctgtgcagcctctggacgcacctttagtgactatggcatgggctggttccgccaggctccagggaaggagcgtgagtttgtagcgactattaactggagtaatggtcgcacaacctatgcagactccgtgaagggccgattcaccatctccagagacaacgccgagaacacggggtatctggaaatgaacagcctgaaagttgaggacacggccctttattactgtgcagcaaccccctccagaaaggcgtatacctactggggccaggggacccaggtcaccgtctcctca

SEQ ID NO: 3728 - DNA, 354 bp, synthetic construct
  source 1..354: mol_type = other DNA
gaggtgcagctggtggagtctgggggaggattggtgcaggctgggggctctctgagactctcctgtgcagcctctggacgcacctttagtgactatggcatgggctggttccgccaggctccagggaaggagcgtgagtttgtagcgactattaactggagtaatggtcgcacaacctatgcagactccgtgaagggccgattcaccatctccagagacaacgccgagaacacggggtatctggaaatgaacagcctgaaagttgaggacacggccctttattactgtgcagcaaccccctccgtaaaggcgtatacctactggggccaggggacccaggtcaccgtctcctca

SEQ ID NO: 3729 - DNA, 354 bp, synthetic construct
  source 1..354: mol_type = other DNA
gaggtgcagctggtggagtctgggggaggattggtgcaggctgggggctctctgagactctcctgtgcagcctctggacgcacctttagtgactatggcatgggctggttccgccaggctccagggaaggagcgtgagtttgtagcgactattaactggagtaatggtcgcacaacctatgcagactccgtgaagggccgattcaccatctccagagacaacgccgagaacacggggtatctggaaatgaacagcctgaaggttgaggacacggccctttattactgtgcagcaaccccctacggaaaggcgtatacctactggggccaggggacccaggtcaccgtctcctca

SEQ ID NO: 3730 - DNA, 354 bp, synthetic construct
  source 1..354: mol_type = other DNA
gaggtgcagctggtggagtctgggggaggcttggtgcagcctggggggtctctaagactctcctgtgcagcctctggacgcacctttagtgactatggcatgggctggttccgccaggctccagggaaggagcgtgagtttgtagcgactattaactggagtaatggtcgcacaacctatgcagactccgtgaagggccgattcaccatctccagagacaacgccgagaacacggggtatctggaaatgaacagcctgaaagttgaggacacggccctttattactgtgcagcaaccccctccggaaaggcgtatacctactggggccaggggacccaggtcaccgtctcctca

SEQ ID NO: 3731 - DNA, 354 bp, synthetic construct
  source 1..354: mol_type = other DNA
gaggtgcagctggtggagtctgggggaggattggtgcaggctgggggctctctgagactctcctgtgcagcctctggacgcacctttagtgactatggcatgggctggttccgccaggctccagggaaggagcgtgagtttgtagcgactattaactggagtaatggtcgcacaacctatgcagaccccgtgaagggccgattcaccatctccagagacaacgccgagaacacggggtatctggaaatgaacagcctgaaagttgaggacacggccctttattactgtgcagcaaccccctccggaagggcgtatacctactggggccaggggacccaggtcaccgtctcctca

SEQ ID NO: 3732 - DNA, 354 bp, synthetic construct
  source 1..354: mol_type = other DNA
gaggtgcagctggtggagtctgggggaggattggtgcaggctgggggctctctgagactctcctgtgcaccctctggacgcacctttagtgactatggcatgggctggttccgccaggctccagggaaggagcgtgagtttgtagcgactattaactggagtaatggtcgcacagcctatgcagactccgtgaagggccgattcaccatctccagagacagcgccaagaacacggggtatctggaaatgaacagcctgaaagttgaggacacggccgtttatgtctgtgcagcaaccccctccggaagggcgtatacctactggggccaggggacccaggtcaccgtctcctca

SEQ ID NO: 3733 - DNA, 354 bp, synthetic construct
  source 1..354: mol_type = other DNA
gaggtgcagctggtggagtctgggggaggattggtgcaggctgggggctctctgagactctcctgtgcagcctctggacgcacctttagtgactatggcatgggctggttccgccaggcccctgggaaggagcatgagtttgtagcgagtattaactggagtaatggtcgcacatcatatgcagactccgcgaagggccggttcaccatctccagagacaacgccaagaacacggggtatctggaaatgaacagcctgaaagttgaggacacggccgtttattactgtgcagcacccccctccggaaaggcgtatacctactggggccaggggacccaggtcaccgtctcctca

SEQ ID NO: 3734 - DNA, 354 bp, synthetic construct
  source 1..354: mol_type = other DNA
gaggtgcagctggtggagtctgggggaggattggtgcaggctgggggctctctgagactctcctgtgcagcctctggacgcacctttagtgactatggcatgggctggttccgccaggctccagggaaggagcgtgagtttgtagcgactattaactggagtaatggtcgcacaacctatgcggactccgtgaagggccgattcaccatctccagagacaacgccgagaacccggggtatctggaaatgaacagcctgaaagttgaggacacggccctttattactgtgcagcaaccccctccggaacggcgtatacctactggggccaggggacccaggtcaccgtctcctca

SEQ ID NO: 3735 - DNA, 354 bp, synthetic construct
  source 1..354: mol_type = other DNA
gaggtgcagctggtggagtctgggggaggattggtgcaggctgggggctctctgagactctcctgtgcagcctctggacgcacctttagtgactatggcatgggctggttccgccaggctccagggaaggagcgtgagtttgtagcgactattaactggagtaatggtcgcacaacctatgcagactccgtgaagggccgattcaccatctccagagacaacgccgagaacacggggtatctggaaatgaacagcctgaaagttgaggacacggccctttattactgtgcagcaaccctctccggaaaggcgtatacctactggggccaggggacccaggtcaccgtctcctca

SEQ ID NO: 3736 - DNA, 354 bp, synthetic construct
  source 1..354: mol_type = other DNA
gaggtgcagctggtggagtctgggggaggattggtgcaggctgggggctctctgagactctcctgtgcagcctctggacgcacctttagtgactatggcatgggctggttccgccaggctccagggaaggagcgtgagtttgtagcgactattaactggagtaatggtcgcacaacctatgcagactccgtgaagggccgattcaccatctccagagacaacgccgagaacacggggtatctggaaatgaacagcctgaaagttgaggacacggccctttattactgtgcagcaaccccctccggagaggcgtatacctactggggccaggggacccaggtcaccgtctcctca

SEQ ID NO: 3737 - DNA, 354 bp, synthetic construct
  source 1..354: mol_type = other DNA
gaggtgcagctggtggagtctgggggaggattggtgcaggctgggggctctctgagactctcctgtgcagcctctggacgcacctttagtgactatggcatgggctggttccgccaggctccagggaaggagagtgagtttgtagcgactattcagtggagtaatggtcgcacaagctatgcagactccgtgaagggccgattcaccatctccagagacaacgccaagaacacggggtatctggaaatgaacagcctgaaagttgaggacacggccgtttattactgtgcagcaacccccttcggaaaggcgtatacctactggggccaggggacccaggtcaccgtctcctca

SEQ ID NO: 3738 - DNA, 354 bp, synthetic construct
  source 1..354: mol_type = other DNA
gaggtgcagctggtggagtctgggggaggattggtgcaggctgggggctctctgagactctcctgtgtagcctctggacgcaccttcagtagttattacataggctggttccgacaggctccagggaaggagggtgagtttgtagcaggtattagctggagtggcaagagcacatcgtatacagactccgtgaagggccgattcaccatctccagagacaacgccgagaacacggggtatctggaaatgaacagcctgaaagttgaggacacggccctttattactgtgcagcaaccccctccggaaaggcgtatacctactggggccaggggacccaggtcaccgtctcctca

SEQ ID NO: 3739 - DNA, 354 bp, synthetic construct
  source 1..354: mol_type = other DNA
gaggtgcagctggtggagtctgggggaggattggtgcaggctgggggctctctgagactctcctgtgcagcctctggacgcacctttagtgactatggcatgggctggttccgccaggctccagggaaggatagtgagtttgtagcggcgattaactggagtaatggtcgcacaaactatgcagactccgtgaagggccgattcaccatctccagagacaacgccaagaacacggggtatctggaaatgaacagcctgaaagttgaggacacggccgtttattactgtgcagcaaccccctccggacaggcgtatagctactggggccaggggacccaggtcaccgtctcctca

SEQ ID NO: 3740 - DNA, 354 bp, synthetic construct
  source 1..354: mol_type = other DNA
gaggtgcagctggtggagtctgggggaggattggtgcaggctgggggctctctgagactctcctgtgcagcctctggacgcacctttagtgactatggcatgggctggttccgccaggctccagggaaggatagtgagtttgtagcggcgattaactggagtaatggtcgcacaaactatgcagactccgtgaagggccgattcaccatctccagagacaacgccaagaacacggggtatctggaaatgaacagcctgaaagttgaggacacggccgtttattactgtgcagcaaccccctccggagaggcgtatagctactggggccaggggacccaggtcaccgtctcctca

SEQ ID NO: 3741 - DNA, 354 bp, synthetic construct
  source 1..354: mol_type = other DNA
gaggtgcagctggtggagtctgggggaggattggtgcaggctgggggctctctgagactctcctgtgcagcctctggacgcacctttagtgactatggcatgggctggttccgccaggctccagggaaggatagtgagtttgtagcggcgattaactggagtaatggtcgcacaaactatgcagactccgtgaagggccgattcaccatctccagagacaacgccaagaacacggggtatctggaaatgaacagcctgaaagttgaggacacggccgtttattactgtacagcaaccccctccggaaaggcgtatagctactggggccaggggacccaggtcaccgtctcctca

SEQ ID NO: 3742 - DNA, 354 bp, synthetic construct
  source 1..354: mol_type = other DNA
gaggtgcagctggtggagtctgggggaggattggtgcaggctgggggctctctgagactctcctgtgcagcctctggacgcacctttagtgactatggcatgggctggttccgccaggctccagggaaggagcatgagtttgtagcgagtattaactggagtaatggtcgcacatcatatgcagactccgcgaagggccggttcaccatctccagagacaacgccaagaacacggggtatctggaaatgaacagcctgaaagttgaggacacggccgtttattactgtgcagcaaccccctccggaaaggcgtatacctactggggccaggggacccaggtcaccgtctcctca

SEQ ID NO: 3743 - DNA, 354 bp, synthetic construct
  source 1..354: mol_type = other DNA
gaggtgcagctggtggagtctgggggaggattggtgcaggctgggggctctctgagactctcctgtgcagcctctggacgcacctttagtgactatggcatgggctggttccgccaggctccagggaaggagcgtgagtttgtagcgactattaactggagtaatggtcgcacaacctatgcagactccgtgaagggccgattcaccatctccagagacaacgccgagaacacggggtatctggaaatgaacagcctgaaagttgaggacacggccctttattactgtgcagcaatcccctccggaaaggcgtatacctactggggccaggggacccaggtcaccgtctcctca

SEQ ID NO: 3744 - DNA, 354 bp, synthetic construct
  source 1..354: mol_type = other DNA
gaggtgcagctggtggagtctgggggaggattggtgcaggctgggggctctctgagactctcctgtgcagcctctggacgcacctttagtgactatggcatgggctggttccgccaggctccagggaaggagcgtgagtttgtagcgactattaactggagtaatggtcgcacaacctatgcagactccgtgaagggccgattcaccatctccagagacaacgccgagaacacggggtatctggaaatgaacagcctgaaagttgaggacacggccctttattactgtgcagcaaccgcctccggaaaggcgtatacctactggggccaggggacccaggtcaccgtctcctca

SEQ ID NO: 3745 - DNA, 354 bp, synthetic construct
  source 1..354: mol_type = other DNA
gaggtgcagctggtggagtctgggggaggattggtgcaggctgggggctctctgagactctcctgtgcagcctctggacgcacctttagtgactatggcatgggctggttccgccaggctccagggaaggagcgtgagtttgtagcgactattaactggagtaatggtcgcacaacctatgcagactccgtgaagggccgattcaccatctccagagacaacgccgagaacacggggtatctggaaatgaacagcctgaaagttgaggacacggccctttattactgtgcagcaaccccctccggaaaggggtatacctactggggccaggggacccaggtcaccgtctcctca

SEQ ID NO: 3746 - DNA, 354 bp, synthetic construct
  source 1..354: mol_type = other DNA
gaggtgcagctggtggagtctgggggaggattggtgcaggctgggggctctctgagactctcctgtgcagcctctggacgcacctttagtgactatggcatgggctggttccgccaggctccagggaaggagcgtgagtttgtagcgactattaactggagtaatggtcgcacaacctatgcagactccgtgaagggccgattcaccatctccagagacaacgccgagaacacggggtatctggaaatgaacagcctgaaagttgaggacacggccctttattactgtgcagcaaccccctccggaaagccgtatacctactggggccaggggacccaggtcaccgtctcctca

SEQ ID NO: 3747 - DNA, 354 bp, synthetic construct
  source 1..354: mol_type = other DNA
gaggtgcagctggtggagtctgggggaggattggtgcaggctgggggctctctgagactctcctgtgcagcctctggacgcacctttagtgactatggcatgggctggttccgccaggctccagggaaggagcgtgagtttgtagcgactattaactggagtaatggtcgcacaacctatgcagactccgtgaagggccgattcaccatctccagagacaacgccgagaacacggggtatctggaaatgaacagcctgaaagttgaggacacggccctttattactgtgcagcaacccgctccggaaaggcgtatacctactggggccaggggacccaggtcaccgtctcctca

SEQ ID NO: 3748 - DNA, 354 bp, synthetic construct
  source 1..354: mol_type = other DNA
gaggtgcagctggtggagtctgggggaggattggtgcaggctgggggctctctgagactctcctgtgcagcctctggacgcacctttagtgactatggcatgggctggttccgccaggctccagggaaggagcgtgagtttgtagcgactattaactggagtaatggtcgcacaacctatgcagactccgtgaagggccgattcaccatctccagagacaacgccgagaacacggggtatctggaaatgaacagcctgaaagttgaggacacggccctttattactgtgcagcaacctcctccggaaaggcgtatacctactggggccaggggacccaggtcaccgtctcctca

SEQ ID NO: 3749 - DNA, 354 bp, synthetic construct
  source 1..354: mol_type = other DNA
gaggtgcagctggtggagtctgggggaggattggtgcaggctgggggctctctgagactctcctgtgcagcctctggacgcacctttagtgactatggcatgggctggttccgccaggctccagggaaggagcgtgagtttgtagcgactattaactggagtaatggtcgcacaacctatgcagactccgtgaagggccgattcaccatctccagagacaacgccgagaacacggggtatctggaaatgaacagcctgaaagttgaggacacggccctttatgactgtgcagcaaccccctccggacaggcgtatacctactggggccaggggacccaggtcaccgtctcctca

SEQ ID NO: 3750 - DNA, 354 bp, synthetic construct
  source 1..354: mol_type = other DNA
gaggtgcagctggtggagtctgggggaggattggtgcaggctgggggctctctgagactctcctgtgcagcctctggacgcacctttagtgactatggcatgggctggttccgccaggctccagggaaggagcgtgagtttgtagcgactattaactggagtaatggtcgcacaacctatgcagactccgtgaagggccgattcaccatctccagagacaccgccgagaacacggggtatctggaaatgaacagcctgaaagttgaggacacggccctttattactgtgcagcacccccctccggaaaggcgtatacctactggggccaggggacccaggtcaccgtctcctca

SEQ ID NO: 3751 - DNA, 354 bp, synthetic construct
  source 1..354: mol_type = other DNA
gaggtgcagctggtggagtctgggggaggattggtgcaggctgggggctctctgagactctcctgtgcagcctctggacgcacctttagtgactatggcatgggctggttccgccaggctccagggaaggagcgtgagtttgtagcgactattaactggagtaatggtcgcacaacctatgcagactccgtgaagggccgattcaccatctccagagacaacgccgagaacacggggtatctggaaatgaacagcctgaaagttgaggacacggccctttattactgtgcagcaaccccctccggaaagacgtatacctactggggccaggggacccaggtcaccgtctcctca

SEQ ID NO: 3752 - DNA, 354 bp, synthetic construct
  source 1..354: mol_type = other DNA
gaggtgcagctggtggagtctgggggaggattggtgcaggctgggggctctctgagactctcctgtgcagcctctggacgcacctttagtgactatggcatgggctggttccgccaggctccagggaaggagcgtgagtttgtagcgactattaactggagtaatggtcgcacaacctatgcagactccgtgaagggccgattcaccatctccagagacaacgccgagaacacggggtatctggaaatgaacagcctgaaagttgaggacacggccctttattactgtgcagcaacccccttcggaaaggcgtatacctactggggccaggggacccaggtcaccgtctcctca

SEQ ID NO: 3753 - DNA, 354 bp, synthetic construct
  source 1..354: mol_type = other DNA
gaggtgcagctggtggagtctgggggaggcttggtgcagcctggggggtctctgagactctcctgtgcagcctctggacgcacctttagtgactatggcatgggctggttccgccaggctccagggaaggagcgtgagtttgtagcgactattaactggagtaatggtcgcacaacctatgcagactccgtgaagggccgattcaccatctccagagacaacgccgagaacacggggtatctggaaatgaacagcctgaaagttgaggacacggccctttattactgtgcagcaaccccctccggaaaggagtatacctactggggccaggggacccaggtcaccgtctcctca

SEQ ID NO: 3754 - DNA, 354 bp, synthetic construct
  source 1..354: mol_type = other DNA
gaggtgcagctggtggagtctgggggaggattggtgcaggctgggggctctctgagactctcctgtgcagcctctggacgcacctttagtgactatggcatgggctggttccgccaggctccagggaaggagcgtgagtttgtagcgactattaactggagtactggtcgcacaacctatgcagactccgtgaagggccgattcaccatctccagagacaacgccgagaacacggggtatctggaaatgaacagcctgaaagttgaggacacggccctttattactgtgcagcaaccccctccggacaggcgtatacctactggggccaggggacccaggtcaccgtctcctca

SEQ ID NO: 3755 - DNA, 354 bp, synthetic construct
  source 1..354: mol_type = other DNA
gaggtgcagctggtggagtctgggggaggattggtgcaggctgggggctctctgagactctcctgtgcagcctctggacgcacctttagtgactatggcatgggctggttccgccaggctccagggaaggagcgtgagtttgtagcgactattaactggagtaatggtcgcacaacctatgcagactccgtgaagggccgattcaccacctccagagacaacgccgagaacacggggtatctggaaatgaacagcctgaaagttgaggacacggccctttattactgtgcagcaacccccaccggaaaggcgtatacctactggggccaggggacccaggtcaccgtctcctca

SEQ ID NO: 3756 - DNA, 354 bp, synthetic construct
  source 1..354: mol_type = other DNA
gaggtgcagctggtggagtctgggggaggattggtgcaggctgggggctctctgagactctcctgtgcagcctctggacgcacctttagtgactatggcatgggctggttccgccaggctccagggaaggagcgtgagtttgtagcgactattaactggagtaatggtcgcacaacctatgcagactccgtgaagggccgattcaccatctccagagacaacgccgagaacacggggtatctggaaatgaacagcctgagagttgaggacacggccctttattactgtgcagcaacccccaccggaaaggcgtatacctactggggccaggggacccaggtcaccgtctcctca

SEQ ID NO: 3757 - DNA, 354 bp, synthetic construct
  source 1..354: mol_type = other DNA
gaggtgcagctggtggagtctgggggaggattggtgcaggctgggggctctctgagactctcctgtgcagcctctggacgcacctttagtgactatggcatgggctggttccgccaggctccagggaaggagcgtgagtttgtagcgactattaactggagtaatggtcgcacaacctatgcagactccgtgaagggccgattcaccatctccagagacaccgccgagaacacggggtatctggaaatgaacagcctgaaagttgaggacacggccctttattactgtgcagcaaccccctccggaacggcgtatacctactggggccaggggacccaggtcaccgtctcctca

SEQ ID NO: 3758 - DNA, 354 bp, synthetic construct
  source 1..354: mol_type = other DNA
gaggtgcagctggtggagtctgggggaggattggtgcaggctgggggctctctgagactctcctgtgcagcctctggacgcacctttagtgactatggcatgggctggttccgccaggctccagggaaggacagtgagtttgtagcgactattaactggagtaatggtcgcacaagctatgcagactccgtgaagggccgattcaccatctccagagacaacgccaagaacacggggtatctggaaatgaacagcctgaaagttgaggacacggccgtttattactgtgcaggaaccccctccggaaaggcgtatacctactggggccaggggacccaggtcaccgtctcctca

SEQ ID NO: 3759 - DNA, 354 bp, synthetic construct
  source 1..354: mol_type = other DNA
gaggtgcagctggtggagtctgggggaggattggtgcaggctgggggctctctgagactctcctgtgcagcctctggacgcacctttagtgactatggaatgggctggttccgccaggctccagggaaggagcatgagtttgtagcgagtattaactggagtaatggtcgcacatcatatgcagactccgcgaagggccggttcaccatctccagagacaacgccaagaacacggggtatctggaaatgaacagcctgaaagttgaggacacggccgtttattactgtgcaggaaccccctccggagaggcgtatacctactggggccaggggacccaggtcaccgtctcctca

SEQ ID NO: 3760 - DNA, 354 bp, synthetic construct
  source 1..354: mol_type = other DNA
gaggtgcagctggtggagtctgggggaggattggtgcaggctgggggctctctgagactctcctgtgcagcctctggacgcacctttagtgactatggaatgggctggttccgccaggctccagggaaggagcatgagtttgtagcgagtattaactggagtaatggtcgcacatcatatgcagactccgcgaagggccggttcaccatctccagagacaacgccaagaacacggggtatctggaaatgaacagcctgaaagttgaggacacggccgtttattactgtgcaggaaccccctccggaaagacgtatacctactggggccaggggacccaggtcaccgtctcctca

SEQ ID NO: 3761 - DNA, 354 bp, synthetic construct
  source 1..354: mol_type = other DNA
gaggtgcagctggtggagtctgggggaggattggtgcaggctgggggctctctgagactctcctgtgcagcctctggacgcacctttagtgactatggaatgggctggttccgccaggctccagggaaggagcatgagtttgtagcgagtattaactggagtaatggtcgcacatcatatgcagactccgcgaagggccggttcaccatctccagagacaacgccaagaacacggggtatctggaaatgaacagcctgaaagttgaggacacggccgtttattactgtgcaggaaccccctccggaaaggcgtatgcctactggggccaggggacccaggtcaccgtctcctca

SEQ ID NO: 3762 - DNA, 354 bp, synthetic construct
  source 1..354: mol_type = other DNA
gaggtgcagctggtggagtctgggggaggattggtgcaggctgggggctctctgagactctcctgtgcagcctctggacgcacctttagtgactatggaatgggctggttccgccaggctccagggaaggagcatgagtttgtagcgagtattaactggagtaatggtcgcacatcatatgcagactccgcgaagggccggttcaccatctccagagacaacgccaagaacacggggtatctggaaatgaacagcctgaaagttgaggacacggccgtttattactgtgcaggaaccccctccggaaaggcgtatacctactggggccaggggacccaggtcaccgtctcctca

SEQ ID NO: 3763 - DNA, 354 bp, synthetic construct
  source 1..354: mol_type = other DNA
gaggtgcagctggtggagtctgggggaggattggtgcaggctgggggctctctgagactctcctgtgcagcctctggacgcacctttagtgactatggaatgggctggttccgccaggctccagggaaggagcatgagtttgtagcgagtattaactggagtaatggtcgcacatcatatgcagactccgcgaagggccggttcaccatctccagagacaacgccaagaacacggggtatctggaaatgaacagcctgaaagttgaggacacggccgtttattactgtgcaggaaccccctccggaaaggcgtatacctcctggggccaggggacccaggtcaccgtctcctca

SEQ ID NO: 3764 - DNA, 354 bp, synthetic construct
  source 1..354: mol_type = other DNA
gaggtgcagctggtggagtctgggggaggattggtggagactgggggctctctgagactctcctgtgcagcctctggacgcaccttcgggaactataccatgggctggttccgccaggctccagggagggagcgtgagtttttagcaagtattaggtggactggtggtagcacaagttatgcagactccgtgaagggccgattcaccatctccagagacaacgccaagaaggcggtgtatctgcaaatgaacagcctgaaacctgaggacacggccgtttattcctgtgtagcaaccccctccggaaaggcgtatagctactggggccaggggacccaggtcaccgtctcctca

SEQ ID NO: 3765 - DNA, 387 bp, synthetic construct
  source 1..387: mol_type = other DNA
gaggtgcagctggtggagtctgggggaggcttggtgcagcctggggggtctctgagactctcctgtgcagcctctggactcactttggattattatgccataggctggttccgccaggccccagggaaggagcgcgagggggtctcatgtattagtactagtgatggtagcacatactatacagactccgtgaagggccgattcaccatctccagagacaatgccaagaatacggtgtatctgcaaatgaacagcctgaaacctgaggacacggccgtgtattactgtgcgactcccggaccttatacgtactgcgccccctacggtagtagctggtcccggggttatgactactggggccaggggacccaggtcaccgtctcctca

SEQ ID NO: 3766 - DNA, 387 bp, synthetic construct
  source 1..387: mol_type = other DNA
gaggtgcagctggtggagtctgggggaggcttggtgcagcctggggggtctctgagactctcctgtgcagcctctggattcactttggattattatgccataggctggttccgccaggccccagggaaggagcgcgagggggtctcatgtattagtactagtgacggtagcacatactatgcagactccgtgaagggccgattcaccatctccagagacaatgccaagaacacggtgtatctgcaaatgaacagcctgaaacctgaggacacgggcgtttattactgtgcgactcccggaccttatatgtactgcgccccctacggtagtagctggtcccggggttatgactactggggccaggggacccaggtcaccgtctcctca

SEQ ID NO: 3767 - DNA, 387 bp, synthetic construct
  source 1..387: mol_type = other DNA
gaggtgcagctggtggagtctgggggaggcttggtgcagcctggggggtctctgagactctcctgtgcagtctctggattcactttggattattatgccataggctggttccgccaggccccagggaaggagcgcgagggggtctcatgtattaatgttggtgatggtagcacaggctatgcagactccgtgaagggccgattcaccatctccagagacaatgccaagaacacggtgtatctgcaaatgaacagcctgaaacctgaggacacggccgtttattactgtgcgactcccggaccttattcgtactgcgccccctacggtagtagctggtcccggggttatgattactggggccaggggacccaggtcaccgtctcctca

SEQ ID NO: 3768 - DNA, 354 bp, synthetic construct
  source 1..354: mol_type = other DNA
gaggtgcagctggtggagtctgggggaggcttggtgcagcctggggggtctctgagactctcctgtgcagcctctggattcaacttcagtatgtattctatgagctgggtccgccaggctccagggaaggggcccgagtgggtctcagctattgatactggtggtagcacaaggtatgcagactccgtgaagggccgattcaccatctccagagacaacgccaagaacacgctgtatctgcaaatggacagcctgaaacctgaggacacggccctgtattactgtgcgagagttcggggtacgccatatgaatatggctacaggggccaggggacccaggtcaccgtctcctca

SEQ ID NO: 3769 - DNA, 354 bp, synthetic construct
  source 1..354: mol_type = other DNA
gaggtgcagctggtggagtctgggggaggcttggcgcagcctggggggtctctgagactctcctgtgcagcctctggattcaacttcagtatgtattctatgagctgggtccgccaggctccagggaaggggcccgagtgggtctcagctattgatactggtggtagcacaaggtatgcagactccgtgaagggccgattcaccatctccagagacaacgccaagaacacgctgtatctgcaaatggacagcctgaaacctgaggacacggccctgtattactgtgcgagagttcggggtacgccatatgaatatggctacaggggccaggggacccaggtcaccgtctcctca

SEQ ID NO: 3770 - DNA, 354 bp, synthetic construct
  source 1..354: mol_type = other DNA
gaggtgcagctggtggagtctgggggaggcttggtgcagcctggggggtctctgagactctcctgtgcagcctctggattcaacttcagtatgtattctatgagctgggtccgccaggctccagggaaggggcccgagtgggtctcagctattgatactggtggtagcacaaggtatgcagactccgtgaagggccgattcaccatctccagagacaacgccaagaacacgctgtatctgcaaatggacagcctgaaacctgaggacacggccctgtattactgtgcgagagttcggggtacgccatatgattatggctacaggggccaggggacccaggtcaccgtctcctca

SEQ ID NO: 3771 - DNA, 354 bp, synthetic construct
  source 1..354: mol_type = other DNA
gaggtgcagctggtggagtctgggggaggcttggtgcagcctggggggtctctgagactctcctgtgcagcctctggattcaacttcagtatgtattctatgagctgggtccgccaggcaccagggaaggggccagagtgggtctcagctattgatactggtggtagcacaaggtatgcagactccgtgaagggccgattcaccatctccagagacaacgcaaagaacacgctgtatctgcaaatggacagcctgaaacctgaggacacggcactgtattactgtgcgagagttcggggtacgacatatgaatatggctacaggggccaggggacccaggtcaccgtctcctca

SEQ ID NO: 3772 - DNA, 354 bp, synthetic construct
  source 1..354: mol_type = other DNA
gaggtgcagctggtggagtctgggggaggcttggtgcagcctggggggtctctgagactctcctgtgcagcctctggattcaacttcagtatgtattctatgagctgggtccgccaggctccagggaaggggcccgagtgggtctcagctattgatactggtggtagcacaaggtatgcagactccgtgaagggccgattcaccatctccagagacaacgccaagaacacgctgtatctgcaaatggacagcctgaaacctgaggacacggccctgtattactgtgcgagagttcggggtacgcaatatgaatatggctacaggggccaggggacccaggtcaccgtctcctca

SEQ ID NO: 3773 - DNA, 354 bp, synthetic construct
  source 1..354: mol_type = other DNA
gaggtgcagctggtggagtctgggggaggcttggtgcagcctggggggtctctgagactctcctgtgcagcctctggattcaacttcagtatgtattctatgagctgggtccgccaggctccagggaaggggcccgagtgggtctcagctattgatactggtggtagcacaaggtatgcagactccgtgaagggccgattcaccatctccagagacaacgccaagaacacgctgtatctgcaaatggacagcctgaaacctgaggacacggccctgtattactgtgcgagagttcggggtacgccatctgaatatggctacaggggccaggggacccaggtcaccgtctcctca

SEQ ID NO: 3774 - DNA, 354 bp, synthetic construct
  source 1..354: mol_type = other DNA
gaggtgcagctggtggagtctgggggaggcttggtgcagcctggggggtctctgagactctcctgtgcagcctctggattcaacttcagtatgtattctatgagctgggtccgccaggctccagggaaggggcccgagtgggtctcagctattgatactggtggtagcacaaggtatgcagactccgtgaagggccgattcaccatctccagagacaacgccaagaacacgctgtatctgcaaatggacagcctgaaacctgaggacacggccctgtattactgtgcgagagttcagggtacgccatatgaatatggctacaggggccaggggacccaggtcaccgtctcctca

SEQ ID NO: 3775 - DNA, 354 bp, synthetic construct
  source 1..354: mol_type = other DNA
gaggtgcagctggtggagtctgggggaggcttggtgcagcctggggggtctctgagactctcctgtgcagcctctggattcaacttcagtatgtattctatgagctgggtccgccaggctccagggaaggggcccgagtgggtgtcagctattgatactggtggtagcacaaggtatgcagactccgtgaagggccgattcaccatctccagagacaacgccaagaacacgctgtatctgcaaatggacagcctgaaacctgaggacacggccctgtattactgtgcgagagttcgggttacgccatatgaatatggctacaggggccaggggacccaggtcaccgtctcctca

SEQ ID NO: 3776 - DNA, 354 bp, synthetic construct
  source 1..354: mol_type = other DNA
gaggtgcagctggtggagtctgggggaggcttggtgcagcctggggggtctctgagactctcctgtgcagcctctggattcaacttcagtatgtattctatgagctgggtccgccaggctccagggaaggggcccgagtgggtctcagctattgatactggtggtagcacaaggtatgcagactccgtgaagggccgattcaccatctccagagacaacgccaagaacacgctgtatctgcaaatggacagcctgaaacctgaggacacggccctgtattactgtgcgagagttcggggtacgccatatgtatatggctacaggggccaggggacccaggtcaccgtctcctca

SEQ ID NO: 3777 - DNA, 354 bp, synthetic construct
  source 1..354: mol_type = other DNA
gaggtgcagctggtggagtctgggggaggcttggtgcagcctggggggtctctgagactctcctgtgcagcctctggattcaacttcagtatgtattctatgagctgggtccgccaggctccagggaaggggcccgagtgggtctcagctattgatactggtggtagcacaaggtatgcagactccgtgaagggccgattcaccatctccagagacaacgccaagaacacgctgtatctgcaaatggacagcctgaaacctgaggacacggccctgtattactgtgcgagagttctgggtacgccatatgaatatggctacaggggccaggggacccaggtcaccgtctcctca

SEQ ID NO: 3778 - DNA, 354 bp, synthetic construct
  source 1..354: mol_type = other DNA
gaggtgcagctggtggagtctgggggaggcttggtgcagcctggggggtctctgagactctcctgtgcagcctctggattcaacttcagtatgtattctatgagctgggtccgccaggctccagggaaggggcccgagtgggtctcagctattgatactggtggtagcacaaggtatgcagactccgtgaagggccgattcaccatctccagagacaacgccaagaacacgctgtatctgcaagtggacagcctgaaacctgaggacacggccctgtattactgtgcgagagttcggggtacgccatatgaatatggctacaggggccaggggacccaggtcaccgtctcctca

SEQ ID NO: 3779 - DNA, 354 bp, synthetic construct
  source 1..354: mol_type = other DNA
gaggtgcagctggtggagtctgggggaggcttggtgcagcctggggggtctctgagactctcctgtgcagcctctggattcaacttcagtatgtattctatgagctgggtccgccaggctccagggaaggggcccgagtgggtctcagctattgatactggtggtagcacaaggtatgcagactccgtgaggggccgattcaccatctccagagacaacgccaagaacacgctgtatctgcaaatggacagcctgaaacctgaggacacggccctgtattactgtgcgagagttcggggtacgccatatgaatatggctacaggggccaggggacccaggtcaccgtctcctca

SEQ ID NO: 3780 - DNA, 354 bp, synthetic construct
  source 1..354: mol_type = other DNA
gaggtgcagctggtggagtctgggggaggcttggtgcagcctggggggtctctgagactctcctgtgcagcctctggattcaacttcagtatgtattctatgagctgggtccgccaggctccagggaaggggcccgagtgggtctcagctattgatactggtggtagcacaaggtatgcagactccgtgaagggccgattcaccatctccagagacaacgccaagaacacgctgtatctgcaaatggacagcctgaaacctgaggacacggccctgtattactgtgcgagagttcgggatacgccatatgaatatggctacaggggccaggggacccaggtcaccgtctcctca

SEQ ID NO: 3781 - DNA, 354 bp, synthetic construct
  source 1..354: mol_type = other DNA
gaggtgcagctggtggagtctgggggaggcttggtgcagcctggggggtctctgagactctcctgtgcagcctctggattcaacttcagtatgtattctatgagctgggtccgccaggctccagggaaggggcccgagtgggtctcagctattgatactggtggtagcacaaggtatgcagactccgtgaagggccgattcaccatctccagagacaacgccaagaacacgctgtatctgcaaatggacagcctgaaacctgaggacacggccctgtattactgtgcgagagttcggggtacgccatttgaatatggctacaggggccaggggacccaggtcaccgtctcctca

SEQ ID NO: 3782 - DNA, 354 bp, synthetic construct
  source 1..354: mol_type = other DNA
gaggtgcagctggtggagtctgggggaggcttggtgcagcctggggggtccctgagactctcctgtgcagcctctggattcaacttcagtatgtattctatgagctgggtccgccaggctccagggaaggggcccgagtgggtctcagctattgatactggtggtagcacaaggtatgcagactccgtgaagggccgattcaccatctccagagacaacgccaagaacacgctgtatctgcaaatggacagcctgaaacctgaggacacggccctgtattactgtgcgagagtttggggtacgccatatgaatatggctacaggggccaggggacccaggtcaccgtctcctca

SEQ ID NO: 3783 - DNA, 354 bp, synthetic construct
  source 1..354: mol_type = other DNA
gaggtgcagctggtggagtctgggggaggcttggtgcagcctggggggtctctgagactctcctgtgcagcctctggattcaacttcagtatgtattctatgagctgggtccgccaggctccagggaaggggcccgagtgggtctcagctattgatactggtggtagcacaaggtatgcagactccgtgaagggccgattcaccatctccagagacaacgccaagaacacgctgtatctgcaaatggacagcctgaaacctgaggacacggccctgtattactgtgcgagagttcggggtaagccatatgaatatggctacaggggccaggggacccaggtcaccgtctcctca

SEQ ID NO: 3784 - DNA, 354 bp, synthetic construct
  source 1..354: mol_type = other DNA
gaggtgcagctggtggagtctgggggaggcttggtgcagcctggggggtctctgagactctcctgtgcagcctctggattcaacttcagtatgtattctatgagctgggtccgccaggctccagggaaggggcccgagtgggtctcagctattgatactggtggtagcacaaggtatgcagactccgtgaggggccgattcaccatctccagagacaacgccaagaacacgctgtatctgcaaatggacagcctgaaacctgaggacacggccctgtattactgtgcgagagttcggggtacgccatatggatatggctacaggggccaggggacccaggtcaccgtctcctca

SEQ ID NO: 3785 - DNA, 354 bp, synthetic construct
  source 1..354: mol_type = other DNA
gaggtgcagctggtggagtctgggggaggcttggtgcagcctggggggtctctgagactctcctgtgcagcctctggattcaacttcagtatgtattctatgagctgggtccgccaggctccagggaaggggcccgagtgggtctcagctattgatactggtggtagcacacggtatgcagactccgtgaagggccgattcaccatctccagagacaacgccaagaacacgctgtatctgcaaatggacagcctgaaacctgaggacacggccctgtattactgtgcgagagttcggggtacgccatatgcatatggctacaggggccaggggacccaggtcaccgtctcctca

SEQ ID NO: 3786 - DNA, 354 bp, synthetic construct
  source 1..354: mol_type = other DNA
gaggtgcagctggtggagtctgggggaggcttggtgcagcctggggggtctctgagactctcctgtgcagcctctggattcaacttcagtatgtattctatgagctgggtccgccaggctccagggaaggggcccgagtgggtctcagctattgatactggtggtagcacaaggtatgcagactccgtgaagggccgattcaccatctccagagacaacgccaagaacacgctgtatctgcaaatggacagcctgaaacctgaggacacggccctgtattactgtgcgagagttcggggtacgccatatggatatggctacaggggccaggggacccaggtcaccgtctcctca

SEQ ID NO: 3787 - DNA, 354 bp, synthetic construct
  source 1..354: mol_type = other DNA
gaggtgcagctggtggagtctgggggaggcttggtgcagcctggggggtctctgagactctcctgtgcagcctctggattcaacttcagtatgtattctatgagctgggtccgccaggctccagggaaggggcccgagtgggtctcagctattgatactggtggtagcacaaggtatgcagactccgtgaagggccgattcaccatctccagagacaacgccaagaacacgctgtatctgcaaatggacagcctgaaacctgaggacacggccctgtattactgtgcgagagttcggggtacgccacatgaatatggctacaggggccaggggacccaggtcaccgtctcctca

SEQ ID NO: 3788 - DNA, 354 bp, synthetic construct
  source 1..354: mol_type = other DNA
gaggtgcagctggtggagtctgggggaggcttggtgcagcctggggggtctctgagactctcctgtgcagcctctggattcaacttcagtatgtattctatgagctgggtccgccaggctccagggaaggggcccgagtgggtctcagctattgatactggtggtagcacaaggtatgcagactccgtgaagggccgattcaccatctccagagacaacgccaagaacacgctgtatctgcaaatggacagcctgaaacctgaggacacggccctgtattactgtgcgagagttcggggtacgccaaatgaatatggctacaggggccaggggacccaggtcaccgtctcctca

SEQ ID NO: 3789 - DNA, 354 bp, synthetic construct
  source 1..354: mol_type = other DNA
gaggtgcagctggtggagtctgggggaggcttggcgcagcctggggggtctctgagactctcctgtgcagcctctggattcaacttcagtatgtattctatgagctgggtccgccaggctccagggaaggggcccgagtgggtctcagctattgatactggtggtagcacaaggtatgcagactccgtgaagggccgattcaccatctccagagacaacgccaagaacacgctgtatctgcaaatggacagcctgaaacctgaggacacggccctgtattactgtgcgagagttcggggtacgccatatgattatggctacaggggccaggggacccaggtcaccgtctcctca

SEQ ID NO: 3790 - DNA, 354 bp, synthetic construct
  source 1..354: mol_type = other DNA
gaggtgcagctggtggagtctgggggaggcttggtgcagcctggggggtctctgagactctcctgtgcagcctctggattcaacttcagtatgtattctatgagctgggtccgccaggctccagggaaggggcccgagtgggtctcagctattgatactggtggtagcacaaggtatgcagactccgtgaagggccgattcaccatctccagagacaacgacaagaacacgctgtatctgcaaatggacagcctgaaacctgaggacacggccctgtattactgtgcgagagttcggggtacgccatatgattatggctacaggggccaggggacccaggtcaccgtctcctca

SEQ ID NO: 3791 - DNA, 354 bp, synthetic construct
  source 1..354: mol_type = other DNA
gaggtgcagctggtggagtctgggggaggcttggtgcagcctggggggtctctgagactctcctgtgcagcctctggattcaacttcagtatgtattctatgagctgggtccgccaggctccagggaaggggcccgagtgggtctcagctattgatactggtggtagcacaaggtatgcagactccgtgaagggccgattcaccatctccagagacaacgccaagaacacgctgtatctgcaaatggacagcctgaaacctgaggacacggccctgtattactgtgcgagagttcggggtccgccatatgaatatggctacaggggccaggggacccaggtcaccgtctcctca

SEQ ID NO: 3792 - DNA, 354 bp, synthetic construct
  source 1..354: mol_type = other DNA
gaggtgcagctggtggagtctgggggaggcttggtgcagcctggggggtctctgagactctcctgtgcagcctctggattcaacttcagtatgtattctatgagctgggtccgccaggctccagggaaggggcccgagtgggtctcagctattgatactggtggtagcacaaggtatgcagactccgtgaagggccgattcaccatctccagagacaacgccaagaacacgctgtatctgcaaatggacagcctgaaacctgaggacacggccctgtattactgtgcgagagttcggggtacgccatataaatatggctacaggggccaggggacccaggtcaccgtctcctca

SEQ ID NO: 3793 - DNA, 357 bp, synthetic construct
  source 1..357: mol_type = other DNA
gaggtgcagctggtggagtctgggggaggcttggtgcagcctgggggttctctgagactctcctgtgcagcctctggattcacttttgatgatattgccatgacctgggtccgacaggctccagggaaggggctggagtgggtgtccagtatttatagttacgggccaaacacatactatgcagactccgtgaagggccgattcaccatctccacagacagcgccaagaacacactgtatctgcaaatggacagcctgaaacctgaggacacggccctgtattactgtgcgagagttcggggtacgccatatgattatggctacaggggccaggggacccaggtcaccgtctcctca

SEQ ID NO: 3794 - DNA, 354 bp, synthetic construct
  source 1..354: mol_type = other DNA
gaggtgcagctggtggagtctgggggaggcttggtgcagcctggggggtctctgagactctcctgtgcagcctctggattcaacttcagtatgtattctatgagctgggtccgccaggctccagggaaggggcccgagtgggtctcagctattgatactggtggtagcacaaggtatgcagactccgtgaagggccgattcaccatctccagagacaacgccaagaacacgctgtatctgcaagtggacagcctgaaacctgaggacacggccctgtattactgtgcgagagttcggggtacgccatatgattatggctacaggggccaggggacccaggtcaccgtctcctca

SEQ ID NO: 3795 - DNA, 354 bp, synthetic construct
  source 1..354: mol_type = other DNA
gaggtgcagctggtggagtctgggggaggcttggtgcagcctggggggtctctgagactctcctgtgcagcctctggattcaacttcagtatgtattctatgagctgggtccgccaggctccagggaaggggcccgagtgggtctcagctattgatactggtggtagcacaaggtatgcagactccgtgaagggccgattcaccatctccagagacaacgccaagaacacgctgtatctgcaaatggacagcctgaaacctgaggacacggccctgtattactgtgcgagagttcggggtacgcgatatgaatatggctacaggggccaggggacccaggtcaccgtctcctca

SEQ ID NO: 3796 - DNA, 354 bp, synthetic construct
  source 1..354: mol_type = other DNA
gaggtgcagctggtggagtctgggggaggcttggtgcagcctggggggtctctgagactctcctgtgcagcctctggattcaacttcagtatgtattctatgagctgggtccgccaggctccagggaaggggcccgagtgggtctcagctattgatactggtggtagcacaaggtatgcagactccgtgaagggccgattcaccatctccagagacaacgccaagaacacgctgtatctgcaaatggacagcctgaaacctgaggacacggccctgtattactgtgcgagagttcggggtacgccatatgattatgcctactggggccgggggacccaggtcaccgtctcctca

SEQ ID NO: 3797 - DNA, 354 bp, synthetic construct
  source 1..354: mol_type = other DNA
gaggtgcagctggtggagtctgggggaggcttggtgcagcctggggggtctctgagactctcctgtgcagcctctggattcaacttcagtatgtattctatgagctgggtccgccaggctccagggaaggggcccgagtgggtctcagctattgatactggtggtagcacaaggtatgcagactccgtgaagggccgattcaccatctccagagacaacgccaagaacacgctgtatctacaactggacagcctgaaacctgaggacacggccctgtattactgtgcgagagttcggggtacgccatatgactatggctacaggggccaggggacccaggtcaccgtctcctca

SEQ ID NO: 3798 - DNA, 354 bp, synthetic construct
  source 1..354: mol_type = other DNA
gaggtgcagctggtggagtctgggggaggcttggtgcagcctggggggtctctgagactctcctgtgcagcctctggattcaacttcagtatgtattctatgagctgggtccgccaggctccagggaaggggcccgagtgggtctcagctattgatactggtggtagcacaaggtatgcagactccgtgaagggccgattcaccatctccagagacaacgccaaaaacacgctgtatctgcaaatggacagcctgaaacctgaggacacggccctgtattactgtgcgagagttcggggtacgccagatgaatatggctacaggggccaggggacccaggtcaccgtctcctca

SEQ ID NO: 3799 - DNA, 354 bp, synthetic construct
  source 1..354: mol_type = other DNA
gaggtgcagctggtggagtctgggggaggcttggtgcagcctggggggtctctgagactctcctgtgcagcctctggattcaccttcagtatgtactctatgagctgggtccgccaggctccagggaaggggcccgagtgggtctcagctattgatactggtggtagcacaaggtatgcagactccgtgatgggccgattcaccatctccagagacaacgccaagaacacgctgtatctgcaaatggacagcctgaaacctgaggacacgggcctgtattactgtgcgagagttcggggttcgccatatgactataactacaggggccaggggacccaggtcaccgtctcctca

SEQ ID NO: 3800 - DNA, 354 bp, synthetic construct
  source 1..354: mol_type = other DNA
gaggtgcagctggtggagtctgggggaggcttggtgcagcctggggggtctctgagactctcctgtgcagcctctggattcaccttcagtatgtactctatgagctgggtccgccaggctccagggaaggggcccgagtgggtctcagctattgatactcgtggtagcacaaggtatgcagactccgtgaagggccgattcaccatctccagagacaacgccaagaacacgctgtatctgcaaatggacagcctgaaacctgaggacacggccctgtattactgtgcgagagtcgggggtgcgccatatgaatataactacaggggccaggggacccaggtcaccgtctcctca

SEQ ID NO: 3801 - DNA, 354 bp, synthetic construct
  source 1..354: mol_type = other DNA
gaggtgcagctggtggagtctgggggaggcttggcgcagcccggggggtctctgagactctcctgtgcagcctctggattcaccttcagtatgtactctatgagctgggtccgccaggctccagggaaggggcccgagtgggtctcagctattgatactcgtggtagcacaaggtatgcagactccgtgaagggccgattcaccatctccagagacaacgccaagaacacgctgtatctgcaaatggacagcctgaaacctgaggacacggccctgtattactgtgcgagagtcgggggtgcgccatatgaatataactacaggggccaggggacccaggtcaccgtctcctca

SEQ ID NO: 3802 - DNA, 354 bp, synthetic construct
  source 1..354: mol_type = other DNA
gaggtgcagctggtggagtctgggggaggcttggtgcagcctggggggtctctgagactctcctgtgcagcctctggattcaccttcagtatgtactctatgagctgggtccgccaggctccagggaaggggcccgagtgggtctcagctattgatactggtggtagcacaaggtatgcagactccgtgatgggccgattcaccatctccagagacaacgccaagaacacgctgtatctgcaaatggacagcctgaaacctgaggacacgggcctgtattactgtgcgagagttcggggttcgccatatgaatataactacaggggccaggggacccaggtcaccgtctcctca

SEQ ID NO: 3803 - DNA, 354 bp, synthetic construct
  source 1..354: mol_type = other DNA
gaggtgcagctggtggagtctgggggaggcttggcgcagcctggggggtctctgagactctcctgtgcagcctctggattcaccttcagtatgtactctatgagctgggtccgccaggctccagggaaggggcccgagtgggtctcagctattgatactggtggtagcacaaggtatgcagactccgtgatgggccgattcaccatctccagagacaacgccaagaacacgctgtatctgcaaatggacagcctgaaacctgaggacacgggcctgtattactgtgcgagagttcggggttcgccatatgaatataactacaggggccaagggacccaggtcaccgtctcctca

SEQ ID NO: 3804 - DNA, 354 bp, synthetic construct
  source 1..354: mol_type = other DNA
gaggtgcagctggtggagtctgggggaggcttggtgcagcccgggaggtctctgagactctcctgtgcagcctctggattcaccttcagtatgtactctatgagctgggtccgccaggctccagggaaggggcccgagtgggtctcagctattgatactgttgataacacaaggtatgcagactccgtgaagggccgattcaccatctccagagacaacgccaagaacacgctgtatctgcaaatggacagcctgaaacctgaggacacggccctgtattactgtgcgagagttcggggtgcgccatatgaatataactacaggggccaggggacccaggtcaccgtctcctca

SEQ ID NO: 3805 - DNA, 354 bp, synthetic construct
  source 1..354: mol_type = other DNA
gaggtgcagctggtggagtctgggggaggcttggtgcagcctggggggtctctgagactctcctgtgcagcctctggattcaacttcagtatgtattctatgagctgggtccgccaggctccagggaaggggcccgagtgggtctcagctattgatactggtggtagcacaaggtatgcagactccgtgaagggccgattcaccatctccagagacaacgccaagaacacgctgtatctgcaaatggacagcctgaaacctgaggacacggccctgtattactgtgcgagagtcgggggtgcgccatatgaatataactacaggggccaggggacccaggtcaccgtctcctca

SEQ ID NO: 3806 - DNA, 354 bp, synthetic construct
  source 1..354: mol_type = other DNA
gaggtgcagctggtggagtctgggggaggcttggtgcagcctggggggtctctgagactctcatgtgcagcctctggattcaccttcagtatgtactctatgagctgggtccgccaggctccagggaaggggcccgagtgggtctcagctattgatactcgtggtagcacaaggtatgcagactccgtgaagggccgactcaccatctccagagacaacgccaagaacacgctgtatctgcaaatggacagcctgaaacctgaggacacggccctgtattactgtgcgagagtcgggggtgcgccatatgaatataactacaggggccaggggacccaggtcaccgtctcctca

SEQ ID NO: 3807 - DNA, 354 bp, synthetic construct
  source 1..354: mol_type = other DNA
gaggtgcagctggtggagtctgggggaggcttggtgcagcctggggggtctctgagactctcctgtgcagcctctggattcaacttcagtatgtactctatgagctgggtccgccaggctccagggaaggggcccgagtgggtctcagctattgatactggtggtagcacaaggtatgcagactccgtgatgggccgattcaccatctccagagacaacgccaagaacacgctgtatctgcaaatggacagcctgaaacctgaggacacgggcctgtattactgtgcgagagttcggggttcgccatatgaatataactacaggggccaggggacccaggtcaccgtctcctca

SEQ ID NO: 3808 - DNA, 354 bp, synthetic construct
  source 1..354: mol_type = other DNA
gaggtgcagctggtggagtctgggggaggcttggtgcagcctggggggtctctgagactctcctgtgcagcctctggattcaacttcagtatgtattctatgagctgggtccgccaggctccagggaaggggcccgagtgggtctcagctattgatactggtggtagcacaaggtatgcagactccgtgaagggccgattcaccatctccagagacaacgccaagaacacgctgtatctgcaaatggacagcctgaaacctgaggacacggccctgtattactgtgcgagagttcggggtgcgccatatgaatatggctacaggggccaggggacccaggtcaccgtctcctca

SEQ ID NO: 3809 - DNA, 354 bp, synthetic construct
  source 1..354: mol_type = other DNA
gaggtgcagctggtggagtctgggggaggcttggtgcagcctggggggtctctgagactctcctgtgcagcctctggattcaacttcagtatgtattctatgagctgggtccgccaggctccagggaaggggcccgagtgggtctcagctattgatactggtggtagcacaaggtatgcagactccgtgaagggccgattcaccatctccagagacaacgccaagaacacgctgtatctgcaaatggacagcctgaaacctgaggacacggccctgtattactgtgcgagagttcggggtgcgccatatgaatataactacaggggccaggggacccaggtcaccgtctcctca

SEQ ID NO: 3810 - DNA, 354 bp, synthetic construct
  source 1..354: mol_type = other DNA
gaggtgcagctggtggagtctgggggaggcttggtgcagcctggggggtctctgagactctcctgtgcagcctctggattcaccttcagtatgtactctatgagctgggtccgccaggctccagggaaggggcccgagtgggtctcagctattgatactcgtggtagcacaaggtatgcagactccgtgaagggccgattcaccatctccagagacaacgccaagaacacgctgtatctgcaaatggacagcctgaaacctgaggacacggccctgtattactgtgcgagagtcgggggtacgccatatgaatatggctacaggggccaggggacccaggtcaccgtctcctca

SEQ ID NO: 3811 - DNA, 354 bp, synthetic construct
  source 1..354: mol_type = other DNA
gaggtgcagctggtggagtctgggggaggcttggtgcagcctggggggtctctgagactctcctgtgcagcctctggattcaacttcagtatgtattctatgagctgggtccgccaggctccagggaaggggcccgagtgggtctcagctattgatactcgtggtagcacaaggtatgcagactccgtgaagggccgattcaccatctccagagacaacgccaagaacacgctgtatctgcaaatggacagcctgaaacctgaggacacggccctgtattactgtgcgagagtcgggggtgcgccatatgaatataactacaggggccaggggacccaggtcaccgtctcctca

SEQ ID NO: 3812 - DNA, 354 bp, synthetic construct
  source 1..354: mol_type = other DNA
gaggtgcagctggtggagtctgggggaggcttggtgcagcctggggggtctctgagactctcctgtgcagcctctggattcaacttcagtatgtattctatgagctgggtccgccaggctccagggaaggggcccgagtgggtctcagctattgatactggtggtagcacaaggtatgcagactccgtgaagggccgattcaccatctccagagacaacgccaagaacacgctgtatctgcaaatggacagcctgaaacctgaggacacggccctgtattactgtgcgagagttgggggtacgccatatgaatatggctacaggggccaggggacccaggtcaccgtctcctca

SEQ ID NO: 3813 - DNA, 354 bp, synthetic construct
  source 1..354: mol_type = other DNA
gaggtgcagctggtggagtctgggggaggcttggtgcagcctggggggtctctgagactctcctgtgcagcctctggattcaccttcagtaagtactctatgagctgggtccgccaggctccagggaaggggcccgagtgggtctcagctattgatactcgtggtagcacaaggtatgcagactccgtgaagggccgattcaccatctccagagacaacgccaagcacacgctgtatctgcaaatggacagcctgaaacctgaggacacggccctgtattactgtgcgagagtcgggggtgcgccatatgaatataactacaggggccaggggacccaggtcaccgtctcctca

SEQ ID NO: 3814 - DNA, 354 bp, synthetic construct
  source 1..354: mol_type = other DNA
gaggtgcagctggtggagtctgggggaggctcggtgcagcctggggggtctctgagactctcctgtgcagcctctggattcaccttcagtatgtactctatgagctgggtccgccaggctccagggaaggggcccgagtgggtctcagctattgatactggtggtagcacaaggtatgcagactccgtgatgggccgattcaccatctccagagacaacgccaagaacacgctgtatctgcaaatggacagcctgaaacctgaggacacgggcctgtattactgtgcgagagttcggggttcgccatatgaatataactacaggggccaggggacccaggtcaccgtctcctca

SEQ ID NO: 3815 - DNA, 354 bp, synthetic construct
  source 1..354: mol_type = other DNA
gaggtgcagctggtggagtctgggggaggcttggtgcagcctggggggtctctgagactctcctgtgcagcctctggattcaccttcagtatgtactctatgagctgggtccgccaggctccagggaaggggcccgagtgggtctcagctattgatactggtggtagcacaaggtatgcagacttcgtgatgggccgattcaccatctccagagacaacgccaagaacacgctgtatctgcaaatggacagcctgaaacctgaggacacgggcctgtattactgtgcgagagttcggggttcgccatatgaatataactacaggggccaggggacccaggtcaccgtctcctca

SEQ ID NO: 3816 - DNA, 354 bp, synthetic construct
  source 1..354: mol_type = other DNA
gaggtgcagctggtggagtctgggggaggcttggtgcagcctggggggtctctgagactctcctgtgcagcctctggattcaccttcagtatgtactctatgagctgggtccgccaggctccagggaaggggcccgagtgggtctcagctattgatactggtggtagcacaaggtatgcagactccgtgatgggccgattcaccatctccagagacaacgccaagaacacgctgtatctgcaaatggacagcctgaaacctgaggacacgggcctgtattactgtgcgagagttcggggttcgccatatggatataactacaggggccaggggacccaggtcaccgtctcctca

SEQ ID NO: 3817 - DNA, 354 bp, synthetic construct
  source 1..354: mol_type = other DNA
gaggtgcagctggtggagtctgggggaggcttggtgcagcctggggggtctctgagactctcctgtgcagcctctggattcaccttcagtatgtactctatgagctgggtccgccaggctccagggaaggggcccgagtgggtctcagctattgatactggtggtagcacaaggtatgcagactccgtgatgggccgattcaccatctccagagacaacgccaagaacacgctgtatctgcaagtggacagcctgaaacctgaggacacgggcctgtattactgtgcgagagttcggggttcgccatatggatataactacaggggccaggggacccaggtcaccgtctcctca

SEQ ID NO: 3818 - DNA, 354 bp, synthetic construct
  source 1..354: mol_type = other DNA
gaggtgcagctggtggagtctgggggaggattggtggaggctgggggctctctgagactctcctgtgcagcctctggacgcaccttcaggagctataccatgggctggttccgccaggctccagggagggagagtgagtttttagcaagtattaggtggactggtggtagcacaagttatgcagactccgtgaagggccgatttaccatctccagagacaacgtcaatgaggcggtgtatctgcaaatgaacagcctgaaacctgaggacacggccgtttattactgtgcagcagcccccaccgggagagcgtttacctactggggccaggggacccaggtcaccgtctcctca

SEQ ID NO: 3819 - DNA, 354 bp, synthetic construct
  source 1..354: mol_type = other DNA
gaggtgcagctggtggagtctgggggaggattggtggaggctgggggctctctgagactctcctgtgcagcctctggacacaccttcgggagctataccgtgggctggttccgccaggctccagggagggagcgtgagtttttagcaagtattaggtggactggtggtagcacaagttatgcagactccgtgaagggccgattcaccatctccagagacaacgccaagaaggcggtgtatctgcaaatgaacagcctgaaacctgaggacacggccgtttattactgtacagcatcccccaccgggagagcgtttacctactggggccaggggacccaggtcaccgtctcctca

SEQ ID NO: 3820 - DNA, 354 bp, synthetic construct
  source 1..354: mol_type = other DNA
gaggtgcagctggtggagtctgggggaggattggtggaggctgggggctctctgagactctcctgtgcagcctctggacgcaccttcaggaactataccatgggctggttccgccaggctccagggagggagcgtgagtttttagcaagtattaggtggactggtggtagcacaagttatgcagactccgtgaagggccgattcaccatctccagagacgacgccaagaaggcggtgtatctgcaaatgaacagcctgaaacctgaggacacggccgtttattactgtacagccgcccccaccgggagagcgtttgcctactggggccaggggacccaggtcaccgtctcctca

SEQ ID NO: 3821 - DNA, 354 bp, synthetic construct
  source 1..354: mol_type = other DNA
gaggtgcagctggtggagtctgggggaggattggtgcaggctgggggctctctgagactctcctgtgcagcctctggacgcaccttcaggaactataccatgggctggttccgccaggctccagggagggagcgtgagtttttagcaagtattaggtggactggtggtagcacaagttatgcagactccgtgaagggccgattcaccatctccagagacgacgccaagaaggcggtgtatctgcaaatgaacagcctgaaacctgaggacacggccgtttattactgtacagcagcccccaccgggagagcgtttgcctactggggccaggggacccaggtcaccgtctcctca

SEQ ID NO: 3822 - DNA, 354 bp, synthetic construct
  source 1..354: mol_type = other DNA
gaggtgcagctggtggagtctgggggaggattggtgcaggctgggggctctctgagactctcctgtgcagcctctggacacaccttcgggagctataccgtgggctggttccgccaggctccagggagggagcgtgagtttttagcaagtattaggtggactggtggtagcacaagttatgcagactccgtgaagggccgattcaccatctccagagacaacgccaagaaggcggtgtatctgcaaatgaacagcctgaaacctgaggacacggccgtttattactgtacagcatcccccaccgggagagcgtttacctactggggccaggggacccaggtcaccgtctcctca

SEQ ID NO: 3823 - DNA, 354 bp, synthetic construct
  source 1..354: mol_type = other DNA
gaggtgcagctggtggagtctgggggaggattggtggaggctgggggctctctgagactctcctgtgcagcctctggacgcaccctcaggaactataccatgggctggttccgccaggctccagggagggagcgtgagtttttagcaagtattaggtggactggtggtagcacaagttatgcagactccgtgaagggccgattcaccatctccagagacgacgccaagaaggcggtgtatctgcaaatgaacagcctgaaacctgaggacacggccgtttattactgtacagcagcccccaccaggagagcgtttgcctactggggccaggggacccaggtcaccgtctcctca

SEQ ID NO: 3824 - DNA, 354 bp, synthetic construct
  source 1..354: mol_type = other DNA
gaggtgcagctggtggagtctgggggaggattggtggaggctgggggctctctgagactctcctgtgcagcctctggacgcaccttcaggagctataccatgggctggttccgccaggctccagggagggagcgtgagtttttagcaagtattaggtggactggtggtagcacaagttatgcagactccgtgaagggccgattcaccatctccagagacgacgccaagaaggcggtgtatctgcaaatgaacagcctgaaacctgaggacacggccgtttattactgtacagcagcccccaccaggagagcgtttgcctactggggccaggggacccaggtcaccgtctcctca

SEQ ID NO: 3825 - DNA, 354 bp, synthetic construct
  source 1..354: mol_type = other DNA
gaggtgcagctggtggagtctgggggaggattggtggaggctgggggctctctgagactctcctgtgcagcctctggacgcaccttcaggaactataccatgggctggttccgccaggctccagggagggagcgtgagtttttagcaagtattaggtggactggtggtagcacaagttatgcagactccgtgaagggccgattcaccatctccagagacgacgccaagaaggcggtgtatctgcaaatgaacagcctgaaacctgaggacacggccgtttattactgtacagcagcccccaccaggagagcgtttgcctactggggccaggggacccaggtcaccgtctcctca

SEQ ID NO: 3826 - DNA, 354 bp, synthetic construct
  source 1..354: mol_type = other DNA
gaggtgcagctggtggagtctgggggaggattggtgcaggctgggggctctctgagactctcctgtgcagcctctggacgcaccttcagtagctataccatgggctggtttcgccaggctccaggaaaggaacatgagtttgtagcagcaattcggtgggctactcttacaacaacctacgcagactccgcgaagggccgattcaccatctccagagacaacgccaataatactgtgtatctggaaatgaacagcctgaaacctgaagacacgggcctttattactgtgcagcagccccgactggtcggtcgtttgcgtactggggtctggggacccaggtcaccgtctcctca

SEQ ID NO: 3827 - DNA, 354 bp, synthetic construct
  source 1..354: mol_type = other DNA
gaggtgcagctggtggagtctgggggaggattggtgcagcctgggggctctctgagactctcctgcgcagcctctggacgcaccttcaggaactataccatgggctggttccgccaggctccagggagggagcgtgagtttttagcaagtattaggtggactggtggtagcacaagttatgcagactccgtgaagggccgattcaccatctccagagacgacgccaagaaggcggtgtatctgcaaatgaacagcctgaaacctgaggacacggccgtttattactgtacagcagcccccaccgggagagcgtttgcctactggggccaggggacccaggtcaccgtctcctca

SEQ ID NO: 3828 - DNA, 354 bp, synthetic construct
  source 1..354: mol_type = other DNA
gaggtgcagctggtggagtctgggggaggattggtggagactgggggctctctgaggctctcctgtgcagcctctgaacgcaccttcgagagcgataccatgggctggttccgccaggctccagggagggagcgtgagtttttagcaagtattaggtggcctggtggtagcacaagttatgcaaactccgtgaagggccgattcaccatctccagagacaacgccaagaaggcggtgtatctgcaaatgaacagcctgaaacctgaggacacggccgtttattcctgtgcagcagcccccaccgggagagcgtttacctacgagggccaggggacccaggtcaccgtctcctca

SEQ ID NO: 3829 - DNA, 354 bp, synthetic construct
  source 1..354: mol_type = other DNA
gaggtgcagctggtggagtctgggggaggattggtggaggctgggggctctctgagactctcctgtgcagcctctggacgcaccttcaggaactataccatgggctggttccgccaggctccagggagggagagtgagtttttagcaagtattaggtggactggtggtagcacaagttatgcagactccgtgaagggccgattcaccatctccagagacaacgccaagacggcagtatatctgcaaatgaacagcctgaaacctgaggacacggccctttattactgtgcagcagcccccaccgggagagcgtttacctactggggccaggggacccaggtcaccgtctcctca

SEQ ID NO: 3830 - DNA, 354 bp, synthetic construct
  source 1..354: mol_type = other DNA
gaggtgcagctggtggagtctgggggaggattggtggaggctgggggctctctgaggctctcctgtgcagcctctggacgcaccttcaggaactataccatgggctggttccgccaggctccagggagggagagtgagtttttagcaagtatcaggtggactggtggtagcacaagttatgcagactccgtgaagggccgattcaccatctccagagacaacgccaagaaggcggtgtatctgcaaatgaacagcctgaaacctgaggacacggccgtttattactgtgcagcagcccccaccgggagagcgtttacctactggggccaggggacccaggtcaccgtctcctca

SEQ ID NO: 3831 - DNA, 354 bp, synthetic construct
  source 1..354: mol_type = other DNA
gaggtgcagctggtggagtctgggggaggattggtggaggctgggggctctctgagactctcctgtgcagcctctggacgcaccttcaggaactataccatgggctggttccgccaggctccagggagggagcgtgagtttttagcaagtattaggtggactggtggtagcacaagttatgcagactccgtgaagggccgattcaccatctccagagacgacgccaagaaggcggtgtatctgcaaatgaacagcctgaaacctgaggacacggccgtttattactgtacagcagcccccaccgtgagagcgtttgcctactggggccaggggacccaggtcaccgtctcctca

SEQ ID NO: 3832 - DNA, 354 bp, synthetic construct
  source 1..354: mol_type = other DNA
gaggtgcagctggtggagtctgggggaggattggtggaggctgggggctctctgagactctcctgtgcagcctctggacacaccttcgggagctataccgtgggctggttccgccaggctccagggagggagcgtgagtttttagcaagtattaagtggactggtggtagcacaagttatgcagactccgtgaagggccaattcaccatctccagagacaacgccaagaaggcggtgtatctgcaaatgaacagcctgaaacctgaggacacggccgtttattactgtacagcatcccccaccgggagagcgtttacctactggggccaggggacccaggtcaccgtctcctca

SEQ ID NO: 3833 - DNA, 354 bp, synthetic construct
  source 1..354: mol_type = other DNA
gaggtgcagctggtggagtctgggggaggattggtggaggctgggggctctctgagactctcctgtgcagcctctggacacaccttcgggagctataccgtgggctggttccgccaggctccagggagggagcgtgagtttttagcaagtattaggcggactggtggtagcacaagttatgcagactccgtgaagggccgattcaccatctccagagacaacgccaagaaggcggtgtatctgcaaatgaacagcctgaaacctgaggacacggccgtttattactgtacagcatcccccaccgggagagcgtttacctactggggccaggggacccaggtcaccgtctcctca

SEQ ID NO: 3834 - DNA, 354 bp, synthetic construct
  source 1..354: mol_type = other DNA
gaggtgcagctggtggagtctgggggaggattggtggagactgggggctctctgagactctcctgtgcagcctctggacgcaccttcgggaactataccatgggctggttccgccaggctccagggagggagcgtgagtttttagccagtattaggtggactggtggtagcacaagttatgcagactccgtgaagggccgattcaccatctccagagacgacgccaagaaggcggtgtatctgcaaatgaacagcctgaaacctgaggacacggccgtgtattactgtacagcagcccccaccgggagagcgtttgcctactggggccaggggacccaggtcaccgtctcctca

SEQ ID NO: 3835 - DNA, 354 bp, synthetic construct
  source 1..354: mol_type = other DNA
gaggtgcagctggtggagtctgggggaggattggtggaggctgggggctctctgagactctcctgtgcagcctctggacgcaccttcaggaactataccatgggctggttccgccaggctccagggagggagcgtgagtttttagcaagtattaggtggactggtggtagcacaagttatgcagactccgtgaagggccgattcaccatctccagagacgacgccaagaaggcggtgtatctgcaaatgaacagcctgaaacctgaggacacggccgtttattactgtacagcagcccccgccgggagagcgtttgcctactggggccaggggacccaggtcaccgtctcctca

SEQ ID NO: 3836 - DNA, 354 bp, synthetic construct
  source 1..354: mol_type = other DNA
gaggtgcagctggtggagtctgggggaggattggtggaggctgggggctctctgagactctcctgtgcagcctctggacgcaccttcaggaactataccatgggctggttccgccaggctccagggagggagcgtgagtttttagcaagtattaggcggactggtggtagcacaagttatgcagactccgtgaagggccgattcaccatctccagagacgacgccaagaaggcggtgtatctgcaaatgaacagcctgaaacctgaggacacggccgtttattactgtacagcagcccccaccgggagagcgtttgcctactggggccaggggacccaggtcaccgtctcctca

SEQ ID NO: 3837 - DNA, 354 bp, synthetic construct
  source 1..354: mol_type = other DNA
gaggtgcagctggtggagtctgggggaggattggtggaggctgggggctctctgagactctcctgtgcagcctctggacgcaccttcaggaactataccatgggctggttccgccaggctccagggagggagcgtgagtttttagcaagtattaggtggactggtcgtagcacaagttatgcagactccgtgaaaggccgattcaccatctccagagacgacgccaagaaggcggtgtatctgcaaatgaacagcctgaaacctgaggacacggccgtttattactgtacagcagcccccaccgggagagcgtttgcctactggggccaggggacccaggtcaccgtctcctca

SEQ ID NO: 3838 - DNA, 354 bp, synthetic construct
  source 1..354: mol_type = other DNA
gaggtgcagctggtggagtctgggggaggattggtggaggctgggggctctctgagactctcctgtgcagcctctggacgcaccttcaggaactataccatgggctggttccgccaggctccagggagggagcgtgagtttttagcaagtattaggtggactggtggtagcacaagttatgcagactccgtgaagggccgattcaccatctccagagacgacgccaagaaggcggtgtatctgcaaatgaacagcctgaaacctgaggacacggccgtttattactgtacagcagcccccaccgggagagcgtttgaccaccggggccgggggacccaggtcaccgtctcctca

SEQ ID NO: 3839 - DNA, 354 bp, synthetic construct
  source 1..354: mol_type = other DNA
gaggtgcagctggtggagtctgggggaggattggtacaggctggaggctctctgagactctcctgtttagcctctggtcgcacctttagtagcttgttcatgggctggtttcgccaggctccagggaaggagcgtgagtttgtagcatctattcggtaccctggtcttataactaactacgcagactccgcgaagggccgattcatcatctccagagacagcgccaaaaacacggtgtatctgcaaatggacagcctgaaacctgaggacacgggcctttattcctgtgcagcagccccaactggtcgagcgtttaattactggggtctggggacccaggtcaccgtctcctca

SEQ ID NO: 3840 - DNA, 354 bp, synthetic construct
  source 1..354: mol_type = other DNA
gaggtgcagctggtggagtctgggggaggattggtggagactgggggctctctgagactctcctgtgcagcctctgaacgcaccttcgagagcgataccatgggctggttccgccaggctccagggagggagcgtgagtttttagcaagtattaggtggcctggtggtagcacaagttatgcaaactccgtgaagggccgattcaccatctccagagacaacgccaagaaggcggtgtatctgcaaatgaacagcctgaaacctgaggacacggccgtttattcctgtgcagcagcccccaccgggaaagcgtttacctacgagggccaggggacccaggtcaccgtctcctca

SEQ ID NO: 3841 - DNA, 354 bp, synthetic construct
  source 1..354: mol_type = other DNA
gaggtgcagctggtggagtctgggggaggattggtacaggctgggggctctctgagactctcctgtttagcctctggtcgcacctttagtagctatttcatgggctggtttcgccaggctccagggaaggagcgtgagtttgtagcatctattcggtaccctggtcttataacaaactacgcagactccgcgaagggccgattcatcatctccagagacagcgccaaaaacacggtgtatctgcaaatgaacagcctgaaacctgaggacacgggcctttattactgtgcagcagccccaactggtcaagcgtttaatatcgggggtctggggacccaggtcaccgtctcctca

SEQ ID NO: 3842 - DNA, 354 bp, synthetic construct
  source 1..354: mol_type = other DNA
gaggtgcagctggtggagtctgggggaggattggtacaggctgggggctctctgagactctcctgtttagcctctggtcgcacctttagtagctatttcatgggctggtttcgccaggctccagggaaggagcatgagtttgtagcatctattcggtaccctggtcttataacaaactacgcagactccgcgaagggccgattcatcatctccagagacagcgccaaaaacacggtgtatctgcaaatgaacagcctgaaacctgaggacacgggcctttattactgtgcagcagccccaactggtcaagcgtttaattactggggtctggggacccaggtcaccgtctcctca

SEQ ID NO: 3843 - DNA, 354 bp, synthetic construct
  source 1..354: mol_type = other DNA
gaggtgcagctggtggagtctgggggaggattggtacaggctgggggctctctgagactctcctgtttagcctctggtcgcacctttagtagctatttcatgggctggtttcgccaggctccagggaaggagcatgagtttgtagcatctattcggtaccctggtcttataacaaactacgcagactccgcgaagggccgattcatcatctccagagacagcgccaaaaacacggtgtatctgcaaatgaacagcctgaaacctgaggacacgggcctttattactgtgcagcagccccaactggtaaagcgtttaattactggggtctggggacccaggtcaccgtctcctca

SEQ ID NO: 3844 - DNA, 339 bp, synthetic construct
  source 1..339: mol_type = other DNA
gaggtgcagctggtggagtctgggggaggctcggtgcaacctggggggtctctgagactcctgtgtgcagtttctggagccagtttaagtaggaacgcaataatttgggtccgccagactccggagaaggggctggagtgggtgtccactatttatgacgacggtgagacatattatagagactccgtgaagggccgattcaccatctcacgagacctcgccgagaacacagtgcatctgcagatgggcaacttacaggctgaggacacggctgtctactattgtgcaggctctgcatttgacttttggggccgggggacccaggtcaccgtctcctca

SEQ ID NO: 3845 - DNA, 348 bp, synthetic construct
  source 1..348: mol_type = other DNA
gaggtgcagctggtggagtctgggggaggcttggtgcaggctggggggtctctgagactctcttgtgcagcctctggaagcaccttcaggttccctcccatgggttggtaccgccaggctccagggaaacagcgcgagcaggtcgcacagcttactagcggtggcagtacaaactatgcagactccgtcaagggccgattcaccatctccagagacaacgccaaaaacacgtggtatctgcaaatgagcagcctgagacctgaggacacggccgtctattactgttctgtgctaggaagagatatgatgacatactggggccaggggacccaggtcaccgtctcctca

SEQ ID NO: 3846 - DNA, 348 bp, synthetic construct
  source 1..348: mol_type = other DNA
gaggtgcagctggtggagtctgggggaggcttggtgcaggctggggggtctctgagactctcttgtgcagcctctggaagcatcttcaggttccctcccatgggttggtaccgccaggctccagggaagcagcgcgaagaggtcgcacagcttactagtggtggcagtacaaactatgcagactccgtgaagggccgattcaccatctccagagacaacgccaaaaacacgtggtatctgcaaatgagcagcctgagacctgaggacacggccgtctattactgttctgtggtaggaagagatatggtgacatactggggccaggggacccaggtcaccgtctcctca

SEQ ID NO: 3847 - DNA, 348 bp, synthetic construct
  source 1..348: mol_type = other DNA
gaggtgcagctggtggagtctggaggaggcttggtgcaggctggggggtctctgagactctcttgcgcagcctctggaaacatcttcaggttccctcccatgggttggtaccgccaggctacagggaagcagcgcgagcaggtcgcacagcttactagtggtggcagtacgaactatgcagactccgtgaagggccgattcaccatctccagagacaacgccaaaaacacgtggtatctgcaaatgagcagcctgagacctgaggacacggccgcctattactgttctgtggtaggaagagatatgatgacatactggggccaggggacccaggtcaccgtctcctca

SEQ ID NO: 3848 - DNA, 348 bp, synthetic construct
  source 1..348: mol_type = other DNA
gaggtgcagctggtggagtctgggggaggcttggtgcaggctggggggtctctgagactctcttgtgcagcctctggaaacatcttcaggttccctcccatgggttggtaccgccaggctccagggaagcagcgcgagcaggtcgcacagcttactagtggtggcagtacaaactatgcagactccgtgaagggccgattcaccatctccagagacaacgccaaaaacacgtggtatctgcaaatgagcagcctgagacctgaggacacggccgcctattactgttctgtggtaggaagagatatgatgacatactggggccaggggacccaggtcaccgtctcctca

SEQ ID NO: 3849 - DNA, 348 bp, synthetic construct
  source 1..348: mol_type = other DNA
gaggtgcagctggtggagtctgggggaggcttggtgcaggctggggggtctctgagactctcttgtgcagcctctggaagcatcttcaggttccctcccatgggttggtaccgccaggctccagggaaacagcgcgagcaggtcgcacagcttactagtggtggcagtacaaactatgcagactccgtcaagggccgattcaccatctccagagacaacgccaaaaacacgtggtatctgcaaatgagcagcctgagacctgaggacacggccgtctattactgttctgtgctaggaagagatatgatgacatactggggccaggggacccaggtcaccgtctcctca

SEQ ID NO: 3850 - DNA, 348 bp, synthetic construct
  source 1..348: mol_type = other DNA
gaggtgcagctggtggagtctgggggaggcttggtgcaggctggggggtctctgagactctcttgtgcagcctctggaagcatcttcaggttccctcccatgggttggtaccgccaggctccagggaagcagcgcgagcaggtcgcacagcttactagtggtggcagtacaaactatgcagactccgtgaagggccgattcaccatctccagagacaacgccaaaaacacgtggtatctgcaaatgagcagcctgagacctgaggacacggccgtctattactgttctatggtaggaagagatatgatgacatactggggccaggggacccaggtcaccgtctcctca

SEQ ID NO: 3851 - DNA, 348 bp, synthetic construct
  source 1..348: mol_type = other DNA
gaggtgcagctggtggagtctgggggaggcttggtgcagcctggggggtctctgagactctcctgtgcagcctctggaagcatcttcaggttccctcccatgggttggtaccgccaggctccagggaagcagcgcgagcaggtcgcacagcttactagtggtggcagtacaaactatgcagactccgtgaagggccgattcaccatctccagagacaacgccaaaaacacgtggtatctgcaaatgagcagcctgagacctgaggacacggccgtctattactgttctatggtaggaagagatatgatgacatactggggccaggggacccaggtcaccgtctcctca

SEQ ID NO: 3852 - DNA, 348 bp, synthetic construct
  source 1..348: mol_type = other DNA
gaggtgcagctggtggagtctgggggaggcttggtgcaggctggggggtctctgagactctcttgtgcagcctctggaagcatcttcaggttccctcccatgggttggtaccgccaggctccagggaagcagcgcgaagaggtcgcacagcttactagtggtggcagtacaaactatgcagactccgtgaagggccgattcaccatctccagagacaacgccaaaaacacgtggtatctgcaaatgagcagcctgagacctgaggacacggccgtctattactgttctgtggtaggaagagatatgatgacatactggggccaggggacccaggtcaccgtctcctca

SEQ ID NO: 3853 - DNA, 348 bp, synthetic construct
  source 1..348: mol_type = other DNA
gaggtgcagctggtggagtctgggggaggcttggtgcaggctggggggtctctgagactctcttgtgcagcctctggaagcatcttcaggttccctcccatgggttggtaccgccaggctccagggaaacagcgcgagcaggtcgcacagcttactagtggtggcagtacaaactatgcagactccgtcaagggccgattcaccatctccagagacaacgccaaaaacacgtggtatctgcaaatgagcagcctgagacctgaggacacggccgtatattactgttctgtgataggaagagatatgatgacatactggggccaggggacccaggtcaccgtctcctca

SEQ ID NO: 3854 - DNA, 348 bp, synthetic construct
  source 1..348: mol_type = other DNA
gaggtgcagctggtggagtctgggggaggcttggtgcaggctggggggtctctgagactctcctgtgcagcctctggaagcatcttcaggttccctcccatgggttggtaccgccaggctccagggaagcagcgcgagcaggtcgcacagcttactagtggtggcagtacaaactatgcagactccgtgaagggccgattcaccatctccagagacaacgccaaaaacacgtggtatctgcaaatgagcagcctgagacctgaggacacggccgtctattactgttatatggtaggaagagatatgatgacatactggggccaggggacccaggtcaccgtctcctca

SEQ ID NO: 3855 - DNA, 348 bp, synthetic construct
  source 1..348: mol_type = other DNA
gaggtgcagctggtggagtctgggggaggcttggtgcaggctggggggtctctgagactctcttgtgcagcctctgggagcatcttcaggttccctcccatgggttggtaccgccaggctccagggaaacagcgcgagcaggtcgcacagcttactagtggtggcagtacaaactatgcagactccgtcaagggccgattcaccatctccagagacaacgccaaaaacacgtggtatctgcaaatgagcagcctgagacctgaggacacggccgtctattactgttctatgctaggaagagatatgatgacatactggggccaggggacccaggtcaccgtctcctca

SEQ ID NO: 3856 - DNA, 348 bp, synthetic construct
  source 1..348: mol_type = other DNA
gaggtgcagctggtggagtctgggggaggcttggtgcaggctggggggtctctgagactctcttgtgcagcctctggaagcatcttcaggttccctcccatgggttggtaccgccaggctccagggaagcagcgcgagcaggtcgcacagcttactagtggtggcagtacaaactatgcagactccgtgaagggccgattcaccatctccagagacaacgccaaaaacacgtggtatctgcaaatgagcagcctgagacctgaggacacggccgtctattactgttctctggtaggaagagatatgatgacatactggggccaggggacccaggtcaccgtctcctca

SEQ ID NO: 3857 - DNA, 348 bp, synthetic construct
  source 1..348: mol_type = other DNA
gaggtgcagctggtggagtctgggggagacttggtgcaggctggggggtctctgagactctcttgtgcagcctctggaagcatcttcaggttccctcccatgggttggtaccgccaggctccagggaaacagcgcgagcaggtcgcacagcttactagtggtggcagtacaaactatgcagactccgtcaagggccgattcaccatctccagagacaacgccaaaaacacgtggtatctgcaaatgagcagcctgagacctgaggacacggccgtctattactgttctgtgctaggaagagatatgatgacatactggggccaggggacccaggtcaccgtctcctca

SEQ ID NO: 3858 - DNA, 348 bp, synthetic construct
  source 1..348: mol_type = other DNA
gaggtgcagctggtggagtctgggggaggcttggtgcaggctggggggtctctgagactctcttgtgcagcctctggaagcatcttcaggttccctcccatgggttggtaccgccaggctccagggaaacagcgcgagcaggtcgcacagcttactagtggtggcagtacaaactatgcagactccgtcaagggccgattcaccatctccagagacaacgccaaaaacacgtggtatctgcaaatgagcagcctgagacctgaggacacggccgtctattactgttctgtgcgaggaagagatatgatgacatactggggccaggggacccaggtcaccgtctcctca

SEQ ID NO: 3859 - DNA, 348 bp, synthetic construct
  source 1..348: mol_type = other DNA
gaggtgcagctggtggagtctgggggaggcttggtgcaggctggggggtctctgagactctcttgtgcagcctctggaagcatcttcaggttccctcccatgggttggtaccgccaggctccagggaagcagcgcgagcaggtcgcacagcttactagtggtggcagtacaaactatgcagactccgtgaagggccgattcaccatctccagagacaacgccaaaaacacgtggtatctgcaaatgagcagcctgagacctgaggacacggccgtctattactgttctagggtaggaagagatatgatgacatactggggccaggggacccaggtcaccgtctcctca

SEQ ID NO: 3860 - DNA, 348 bp, synthetic construct
  source 1..348: mol_type = other DNA
gaggtgcagctggtggagtctgggggaggcttggtgcaggctggggggtctctgagactctcttgtgcagcctctggaagcatcttcaggttccctcccatgggttggtaccgccaggctccagggaaacagcgcgagcaggtcgcacagcttactagtggtggcagtacaaactatgcagactccgtcaagggccgattcaccatctccagagacaacgccaaaaacacgtggtatctgcaaatgagcagcctgagacctgaggacacggccgtctattactgttctatggtaggaagagatatgaggacatactggggccaggggacccaggtcaccgtctcctca

SEQ ID NO: 3861 - DNA, 348 bp, synthetic construct
  source 1..348: mol_type = other DNA
gaggtgcagctggtggagtctgggggaggcttggtgcaggctggggggtctctgagactctcttgtgcagcctctggaagcatcttcaggttccctcccatgggttggtaccgccaggctccagggaaacagcgcgagcaggtcgcacagcttactagtggtggcagtacaaactatgcagactccgtcaagggccgattcaccatctccagagacaacgccaaaaacacgtggtatctgcaaatgagcagcctgagacctgaggacacggccgtctattactgttctgcgctaggaagagatatgatgacatactggggccagggaacccaggtcaccgtctcctca

SEQ ID NO: 3862 - DNA, 348 bp, synthetic construct
  source 1..348: mol_type = other DNA
gaggtgcagctggtggagtctgggggaggcttggtgcaggctggggggtctctgagactctcttgtgcagcctctggaagcatcttcaggttccctcccatgggttggtaccgccaggctccagggaagcagcgcgagcaggtcgcacagcttactagtggtggcagtacaaactatgcagactccgtgaagggccgattcaccatctccagagacaacgccaaaaacacgtggtatctgcaaatgagcagcctgagacctgaggacacggccgtctattactgttctatggtaggaagagatatgatgacagactggggccaggggacccaggtcaccgtctcctca

SEQ ID NO: 3863 - DNA, 348 bp, synthetic construct
  source 1..348: mol_type = other DNA
gaggtgcagctggtggagtctgggggagacttggtgcaggctggggggtctctgagactctcctgtgcagcctctggaagcatcttcaggttccctcccatgggttggtaccgccaggctccagggaagcagcgcgagcaggtcgcacagcttactagtggtggcagtacaaactatgcagactccgtgaagggccgattcaccatctccagagacaacgccaaaaacacgtggtatctgcaaatgagcagcctgagacctgaggacacggccgtctattactgttctatggtaggaagagatatgatgacatactggggccaggggacccaggtcaccgtctcctca

SEQ ID NO: 3864 - DNA, 348 bp, synthetic construct
  source 1..348: mol_type = other DNA
gaggtgcagctggtggagtctgggggaggcttggtgcaggctggggggtctctgagactctcttgtgcagcctctggaagcatcttcaggttccctcccatgggttggtaccgccaggctccagggaaacagcgcgagcaggtcgcacagcttactagtggtggcagtacaaactatgcagactccgtcaagggccggttcaccatctccagagacaacgccaaaaacacgtggtatctgcaaatgagcagcctgagacctgaggacacggccgtctattactgttctgagctaggaagagatatgatgacatactggggccaggggacccaggtcaccgtctcctca

SEQ ID NO: 3865 - DNA, 348 bp, synthetic construct
  source 1..348: mol_type = other DNA
gaggtgcagctggtggagtctgggggaggctcggtgcaggctggggggtctctgagactctcttgtgcagcctctggaagcatcttcaggttccctcccatgggttggtaccgccaggctccagggaagcagcgcgagcaggtcgcacagcttactagtggtggcagtacaaactatgcagactccgtgaagggccgattcaccatctccagagacaacgccaaaaacacgtggtatctgcaaatgagcagcctgagacctgaggacacggccgtctattactgttctatggtaggaagagatatgatgacatactggggccaggggacccaggtcaccgtctcctca

SEQ ID NO: 3866 - DNA, 348 bp, synthetic construct
  source 1..348: mol_type = other DNA
gaggtgcagctggtggagtctgggggaggctcggtgcaggctggggggtctctgaggctctcttgtgcagcctctgggagcatcttcaggttccctcccatgggttggtaccgccaggctccagggaaacagcgcgagcaggtcgcacagcttactagtggtggcagtacaaactatgcagactccgtcaagggccgattcaccatctccagagacaacgccaaaaacacgtggtatctgcaaatgagcagcctgagacctgaggacacggccgtctattactgttctatgctaggaagagatatgatgacatactggggccaggggacccaggtcaccgtctcctca

SEQ ID NO: 3867 - DNA, 348 bp, synthetic construct
  source 1..348: mol_type = other DNA
gaggtgcagctggtggagtctgggggaggcttggtgcaggctggggggtctctgagactctcttgtgcagcctctggaagcatcttcaggttccctcccatgggttggtaccgccaggctccagggaagcagcgcgagcaggtcgcacagcttactagtggtggcagtgcaaactatgcagactccgtgaagggccgattcaccatctccagagacaacgccaaaaacacgtggtatctgcaaatgagcagcctgagacctgaggacacggccgtctattactgttctatggtaggaagagatatgatgacatactggggccaggggacccaggtcaccgtctcctca

SEQ ID NO: 3868 - DNA, 348 bp, synthetic construct
  source 1..348: mol_type = other DNA
gaggtgcagctggtggagtctgggggagacttggtgcaggctggggggtctctgagactctcctgtgcagcctctggaagcatcttcaggttccctcccatgggttggtaccgccaggctccagggaagcagcgcgaagaggtcgcacagcttactagtggtggcagtacaaactatgcagactccgtgaagggccgattcaccatctccagagacaacgccaaaaacacgtggtatctgcaaatgagcagcctgagacctgaggacacggccgtctattactgttctgtggtaggaagagatatggtgacatactggggccaggggacccaggtcaccgtctcctca

SEQ ID NO: 3869 - DNA, 348 bp, synthetic construct
  source 1..348: mol_type = other DNA
gaggtgcagctggtggagtctgggggaggcttggtgcaggctggggggtctctgagactctcttgtgcagcctctggaagcatcttcaggttccctcccatgggttggtaccgccaggctccagggaaacagcgcgagcaggtcgcacagcttactagtggtggcagtacaaactatgcagactccgtcaagggccgattcaccatctccagagacaacgccaaaaacacgtggtatctgcaaatgagcagcctgagacctgaggacacggccgtctattactgttctgtgccaggaagagatatgatgacatactggggccaggggacccaggtcaccgtctcctca

SEQ ID NO: 3870 - DNA, 348 bp, synthetic construct
  source 1..348: mol_type = other DNA
gaggtgcagctggtggagtctgggggaggctcggtgcaggctggggggtctctgagactctcttgtgcagcctctggaagcatcttcaggttccctcccatgggttggtaccgccaggctccagggaaacagcgcgagcaggtcgcacagcttactagtggtggcagtacaaactatgcagactccgtcaagggccgattcaccatctccagagacaacgccaaaaacacgtggtatctgcaaatgagcagcctgagacctgaggacacggccgtctattactgttctgtgctaggaagagatatgatgacatactggggccaggggacccaggtcaccgtctcctca

SEQ ID NO: 3871 - DNA, 348 bp, synthetic construct
  source 1..348: mol_type = other DNA
gaggtgcagctggtggagtctgggggaggcttggtgcaggctggggggtctctgagactctcttgtgcagcctctggaagcatcttcaggttccctcccatgggttggtaccgccaggctccagggaagcagcgcgagttggtcgcacagcttactagtggtggcagtacaaactatgcagactccgtgaagggccgattcaccatctccagagacaacgccaaaaacacgtggtatctgcaaatgagcagcctgagacctgaggacacggccgtctattactgttctgtggtaggaagagatatggtgacatactggggccaggggacccaggtcaccgtctcctca

SEQ ID NO: 3872 - DNA, 348 bp, synthetic construct
  source 1..348: mol_type = other DNA
gaggtgcagctggtggagtctgggggaggcttggtgcaggctggggggtctctgagactctcttgtgcagcctctggaagcatcttcaggttccctcccatgggttggtaccgccaggctccagggaaacagcgcgagcaggtcgcacagcttactagtggtggcagtacaaactatgcagactccgtcaagggccgattcaccatctccagagacaacgccaaaaacgcgtggtatctgcaaatgagcagcctgagacctgaggacacggccgtctattactgttctgtgctaggaagagatatgatgacatactggggccaggggacccaggtcaccgtctcctca

SEQ ID NO: 3873 - DNA, 348 bp, synthetic construct
  source 1..348: mol_type = other DNA
gaggtgcagctggtggagtctgggggagacttggtgcaggctggggggtctctgagactctcttgtgcagcctctgggagcatcttcaggttccctcccatgggttggtaccgccaggctccagggaaacagcgcgagcaggtcgcacagcttactagtggtggcagtacaaactatgcagactccgtcaagggccgattcaccatctccagagacaacgccaaaaacacgtggtatctgcaaatgagcagcctgagacctgaggacacggccgtctattactgttctatgctaggaagagatatgatgacatactggggccaggggacccaggtcaccgtctcctca

SEQ ID NO: 3874 - DNA, 348 bp, synthetic construct
  source 1..348: mol_type = other DNA
gaggtgcagctggtggagtctgggggaggcttggtgcaggctggggggtctctgagactctcttgtgcagcctctggaagcatcttcaggttccctcccatgggttggtaccgccaggctccagggaaacagcgcgagcaggtcgcacagcttactagtggtggcagtacaaactatgcagactccgtcaagggccgattcaccatctccagagacaacgacaaaaacacgtggtatctgcaaatgagcagcctgagacctgaggacacggcagtctattactgttctgtgataggaagagatatgatgacatactggggccaggggacccaggtcaccgtctcctca

SEQ ID NO: 3875 - DNA, 348 bp, synthetic construct
  source 1..348: mol_type = other DNA
gaggtgcagctggtggagtctgggggaggcttggtgcagcctggggggtctctgagactctcctgtgcagcctctggaagcatcttcaggttccctcccatgggttggtaccgccaggctccagggaagcagcgcgagcaggtcgcacagcttactagtggtggcagtacaaactatgcagactccgttaagggccgattcaccatctccagagacaacgccaaaaacacgtggtatctgcaaatgagcagcctgagacctgaggacacggccgtatattactgttatatggtaggaagagatatgatgacatactggggccaggggacccaggtcaccgtctcctca

SEQ ID NO: 3876 - DNA, 348 bp, synthetic construct
  source 1..348: mol_type = other DNA
gaggtgcagctggtggagtctgggggaggcttggtgcaggctggggggtctctgagactctcttgtgcagcctctggaagcatcttcaggttccctcccatgggttggtaccgccaggctccagggaaacagcgcgagcaggtcgcacagcttactagtggtggcagtacaaactatgcagactccgtcaagggccgattcaccatctccagagacaacgccaaaaacacgtggtatctgcaaatgagcagcctgagacctgaggacacggccgtctattactgttctttgctaggaagagatatgatgacatactggggccaggggacccaggtcaccgtctcctca

SEQ ID NO: 3877 - DNA, 348 bp, synthetic construct
  source 1..348: mol_type = other DNA
gaggtgcagctggtggagtctgggggaggcttggtgcaggctggggggtctctgagactctcttgtgcagcctctggaagcatcttcaggttccctcccatgggttggtaccgccaggctccagggaaacagcgcgagcaggtcgcacagcttactagtggtggcagtacaaactatgcagactccgtcaagggccgattcaccatctccagagacaacgccaaaaacacgtggtatctgcaaatgagcagcctgagacctgaggacacggccgtctattactgttctgggctaggaagagatatgatgacatactggggccaggggacccaggtcaccgtctcctca

SEQ ID NO: 3878 - DNA, 348 bp, synthetic construct
  source 1..348: mol_type = other DNA
gaggtgcagctggtggagtctgggggaggcttggtgcaggctggggggtctctgagactctcttgtgcagcctctggaagcatcttcaggttccctcccatgggttggtaccgccaggctccagggaagcagcgcgagcaggtcgcacagcttactagtggtggcagtacaaactatgcagactccgtgaagggccgattcaccatctccagagacaacgcaaaaaacacgtggtatctgcaaatgagcagcctgagacctgaggacacggccgtctattactgttctatggtaggaagagatatgctgacatactggggccaggggacccaggtcaccgtctcctca

SEQ ID NO: 3879 - DNA, 348 bp, synthetic construct
  source 1..348: mol_type = other DNA
gaggtgcagctggtggagtctgggggaggcttggtgcaggctggggggtctctgagactctcttgtgcagcctctggaagcatcttcaggttccctcccatgggttggtaccgccaggctccagggaagcagcgcgagcaggtcgcacagcttactagtggtggcagtacaaactatgcagactccgtgaagggccgattcaccatctccagagacaacgccaaaaacacgtggtatctgcaaatgagcagcctgagacctgaggacacggccgtctattactgttctatggtaggaagagatttgatgacatactggggccaggggacccaggtcaccgtctcctca

SEQ ID NO: 3880 - DNA, 348 bp, synthetic construct
  source 1..348: mol_type = other DNA
gaggtgcagctggtggagtctgggggaggcttggtgcaggctggggggtctctgagactctcttgtgcagcctctggaagcatcttcaggttccctcccatgggttggtaccgccaggctccagggaagcagcgcgagcaggtcgcacagcttactagtggtggcagtacaaactatgcagactccgtgaagggccgattcaccatctccagagacaacgccaaaaacacgtggtatctgcaaatgagcagcctgagacctgaggacacggccgtctattactgttctatgggaggaagagatatgatgacatactggggccaggggacccaggtcaccgtctcctca

SEQ ID NO: 3881 - DNA, 348 bp, synthetic construct
  source 1..348: mol_type = other DNA
gaggtgcagctggtggagtctgggggaggcttggtgcaggctggggggtctctgagactctcttgtgcagcctctggaagcatcttcaggttccctcccatgggttggtaccgccaggctccagggaagcagcgcgagcaggtcgcacagcttactagtggtggcagtacaaactatgcagactccgtgaagggccgattcaccatctccagagacaacgccaaaaacacgtggtatctgcaaatgagcagcctgagacctgaggacacggccgtctattactgttctattgtaggaagagatatgatgacatactggggccaggggacccaggtcaccgtctcctca

SEQ ID NO: 3882 - DNA, 348 bp, synthetic construct
  source 1..348: mol_type = other DNA
gaggtgcagctggtggagtctgggggaggcttggtgcaggctggggggtctctgagactctcttgtgcagcctctggaagcatcttcaggttccctcccatgggttggtaccgccaggctccagggaagcagcgcgagcaggtcgcacagcttactagtggtggcagtacaaactatgcagactccgtgaagggccgattcaccatctccagagacaacgccaaaaacacgtggtatctgcaaatgagcagcctgagacctgaggacacggccgtctattactgttctatggtagtaagagatatgatgacatactggggccaggggacccaggtcaccgtctcctca

SEQ ID NO: 3883 - DNA, 348 bp, synthetic construct
  source 1..348: mol_type = other DNA
gaggtgcagctggtggagtctgggggaggcttggtgcaggctggggggtctctgagactctcttgtgcagcctctggaagcatcttcaggttccctcccatgggttggtaccgccaggctccagggaagcagcgcgagcaggtcgcacagcttactagtggtggcagtacaaactatgcagactccgtgaagggccgattcaccatctccagagacaacgccaaaaacacgtggtatctgcaaatgagcagcctgagacctgaggacacggccgtctattactgtactatggtaggaagagatatgatgacatactggggccaggggacccaggtcaccgtctcctca

SEQ ID NO: 3884 - DNA, 348 bp, synthetic construct
  source 1..348: mol_type = other DNA
gaggtgcagctggtggagtctgggggaggcttggtgcaggctggggggtctctgagactctcttgtgcagcctctggaagcatcttcaggttccctcccatgggttggtaccgccaggctccagggaagcagcgcgagcaggtcgcacagcttactagtggtggcagtacaaactatgcagactccgtgaagggccgattcaccatctccagagacaacgccaaaaacacgtggtatctgcaaatgagcagcctgagacctgaggacacggccgtctattactgttctatggtaggaagtgatatgatgacatactggggccaggggacccaggtcaccgtctcctca

SEQ ID NO: 3885 - DNA, 348 bp, synthetic construct
  source 1..348: mol_type = other DNA
gaggtgcagctggtggagtctgggggaggcttggtgcaggctggggggtctctgagactctcttgtgcagcctctggaagcatcttcaggttccctcccatgggttggtaccgccaggctccagggaaacagcgcgagcaggtcgcacagcttactagtggtggcagtacaaactatgcagactccgtcaagggccgattcaccatctccagagacaacgccaaaaacacgtggtatctgcaaatgagcagcctgagacctgaggacacggccgtctattactgttctgtgctaggaagagataagatgacatactggggccaggggacccaggtcaccgtctcctca

SEQ ID NO: 3886 - DNA, 348 bp, synthetic construct
  source 1..348: mol_type = other DNA
gaggtgcagctggtggagtctgggggaggcttggtgcaggctggggggtctctgagactctcttgtgcagcctctggaggcatcttcaggttccctcccatgggttggtaccgccaggctccagggaaacagcgcgagcaggtcgcacagcttactagtggtggcagtacaaactatgcagactccgtcaagggccgattcaccatctccagagacaacgccaaaaacacgtggtatctgcaaatgagcagcctgagacctgaggacacggccgtctattactgttctgtgctaggaggagatatgatgacatactggggccaggggacccaggtcaccgtctcctca

SEQ ID NO: 3887 - DNA, 348 bp, synthetic construct
  source 1..348: mol_type = other DNA
gaggtgcagctggtggagtctgggggaggcttggtgcaggctggggggtctctgagactctcttgtgcagcctctggaagcatcttcaggttccctcccatgggttggtaccgccaggctccagggaaacagcgcgagcaggtcgcacagcttactagtggtggcagtacaaactatgcagactccgtcaagggccgattcaccatctccagagacaacgccaaaaacacgtggtatctgcaaatgagcagcctgagacctgaggacacagccgtatattactgttatgtgctaggaagagatatgatgacatactggggccaggggacccaggtcaccgtctcctca

SEQ ID NO: 3888 - DNA, 348 bp, synthetic construct
  source 1..348: mol_type = other DNA
gaggtgcagctggtggagtctgggggaggcttggtgcaggctggggggtctctgagactctcttgtgcagcctctggaagcatcttcaggttccctcccatgggttggtaccgccaggctccagggaaacagcgcgagcaggtcgcacagcttactagtggtggcagtacaaactatgcagactccgtcaagggccgattcaccatctccagagacaacgccaaaaacacgtggtatctgcaaatgagcagcctgagacctgaggacacggccgtctattactgttctgtgctaggaagagatatgatgacagactggggccaggggacccaggtcaccgtctcctca

SEQ ID NO: 3889 - DNA, 348 bp, synthetic construct
  source 1..348: mol_type = other DNA
gaggtgcagctggtggagtctgggggaggcttggtgcaggctggggggtctctgagactctcttgtgcagcctctggaagcatcttcaggttccctcccatgggttggtaccgccaggctccagggaaacagcgcgagcaggtcgcacagcttactagtggtggcagtacaaactatgcagactccgtcaagggccgattcaccatctccagagacaacgccaaaaacacgtggtatctgcaaatgagcagcctgagacctgaggacacggccgtctattactgttctgtgctaggaagcgatatgatgacatactggggccaggggacccaggtcaccgtctcctca

SEQ ID NO: 3890 - DNA, 348 bp, synthetic construct
  source 1..348: mol_type = other DNA
gaggtgcagctggtggagtctgggggaggctcggtgcaggctggggggtctctgagactctcttgtgcagcctctggaagcatcttcaggttccctcccatgggttggtaccgccaggctccagggaaacagcgcgagcaggtcgcacagcttactagtggtggcagtacaaactatgcagactccgtcaagggccgattcaccatctccagagacaacgccaaaaacacgtggtatctgcaaatgagcagcctgagacctgaggacacggccgtctattactgttctgtgctaggaagcgatatgatgacatactggggccaggggacccaggtcaccgtctcctca

SEQ ID NO: 3891 - DNA, 348 bp, synthetic construct
  source 1..348: mol_type = other DNA
gaggtgcagctggtggagtctgggggagacttggtgcaggctggggggtctctgagactctcttgtgcagcctctggaagcatcttcaggttccctcccatgggttggtaccgccaggctccagggaagcagcgcgagcaggtcgcacagcttactagtggtggcagtacaaactatgcagactccgtgaagggccgattcaccatctccagagacaacgccaaaaacacgtggtatctgcaaatgagcagcctgagacctgaggacacggccgtctattactgttctgtgctaggaagcgatatgatgacatactggggccaggggacccaggtcaccgtctcctca

SEQ ID NO: 3892 - DNA, 348 bp, synthetic construct
  source 1..348: mol_type = other DNA
gaggtgcagctggtggagtctgggggaggcttggtgcaggctggggggtctctgagactctcttgtgcagcctctggaagcatcttcaggttccctcccatgggttggtaccgccaggctccagggaaacagcgcgagcaggtcgcacagcttactagtggtggcagtacaaactatgcagactccgtcaagggccgattcaccatctccagagacaacgccaaaaacacgtggtatctgcaaatgagcagcctgagacctgaggacacggccgtctattactgttctgtgctaggaggagatatgatgacatactggggccaggggacccaggtcaccgtctcctca

SEQ ID NO: 3893 - DNA, 348 bp, synthetic construct
  source 1..348: mol_type = other DNA
gaggtgcagctggtggagtctgggggaggcttggtgcaacctggggggtctctgagactctcttgtgcagcctcaggaagcatcttcaggttccctcccatgggttggtaccgccaggctccagggaaacagcgcgagcaggtcgcacagcttactagtggtggcagtacaaactatgcagactccgtcaagggccgattcaccatctccagagacaacgccaaaaacacgtggtatctgcaaatgagcagcctgagacctgaggacacggccgtctattactgttctgtgctaggaggagatatgatgacatactggggccaggggacccaggtcaccgtctcctca

SEQ ID NO: 3894 - DNA, 348 bp, synthetic construct
  source 1..348: mol_type = other DNA
gaggtgcagctggtggagtctgggggaggcttggtgcaggctggggggtctctgagactctcttgtgcagcctctggaagcatcttcaggttccctcccatgggttggtaccgccaggctccagggaaacagcgcgagcaggtcgcacagcttactagtggtggcagtacaaactatgcagactccgtcaagggccgattcaccatctccagagacaacgccaaaaacacgtggtatctgcaaatgagcagcctgagacctgaggacacggccgtctattactgttctgtgctaggaagagatatgaggacatactggggccaggggacccaggtcaccgtctcctca

SEQ ID NO: 3895 - DNA, 348 bp, synthetic construct
  source 1..348: mol_type = other DNA
gaggtgcagctggtggagtctgggggaggcttggtgcaggctggggggtctctgagactctcttgtgcagcctctggaagcatcttcaggttccctcccatgggttggtaccgccaggctccagggaaacagcgcgagcaggtcgcacagcttactagtggtggcagtacaaactatgcagactccgtcaagggccgattcaccatctccagagacaacgccaaaaacacgtggtatctgcaaatgagcagcctgagacctgaggacacggccgtctattactgtgctgtgctaggaagagatatgatgacatactggggccaggggacccaggtcaccgtctcctca

SEQ ID NO: 3896 - DNA, 348 bp, synthetic construct
  source 1..348: mol_type = other DNA
gaggtgcagctggtggagtctgggggaggcttggtgcaggctggggggtctctgagactctcttgtgcagcctctggaagcatcttcaggttccctcccatgggttggtaccgccaggctccagggaaacagcgcgagcaggtcgcacagcttactagtggtggcagtacaaactatgcagactccgtcaagggccgattcaccatctccagagacaacgccaaaaacacgtggtatctgcaaatgagcagcctgagacctgaggacacggccgtctattactgttctgtgctaggaagagatatgctgacatactggggccaggggacccaggtcaccgtctcctca

SEQ ID NO: 3897 - DNA, 348 bp, synthetic construct
  source 1..348: mol_type = other DNA
gaggtgcagctggtggagtctgggggaggcttggtgcaggctggggggtctctgagactctcttgtgcagcctctggaagcatcttcaggttccctcccatgggttggtaccgccaggctccagggaaacagcgcgagcaggtcgcacagcttactagtggtggcagtacaaactatgcagactccgtcaagggccgattcaccatctccagagacaacgccaaaaacacgtggtatctgcaaatgagcagcctgagacctgaggacacggccgtctattactgttctgtgctaggaagagatttgatgacatactggggccaggggacccaggtcaccgtctcctca

SEQ ID NO: 3898 - DNA, 348 bp, synthetic construct
  source 1..348: mol_type = other DNA
gaggtgcagctggtggagtctgggggaggcttggtgcaggctggggggtctctgagactctcttgtgcagcctctggaagcatcttcaggttccctcccatgggttggtaccgccaggctccagggaaacagcgcgagcaggtcgcacagcttactagtggtggcagtacaaactatgcagactccgtcaagggccgattcaccatctccagagacaacgccaaaaacacgtggtatctgcaaatgagcagcctgagacctgaggacacggccgtctattactgttctgtgctagtaagagatatgatgacatactggggccaggggacccaggtcaccgtctcctca

SEQ ID NO: 3899 - DNA, 348 bp, synthetic construct
  source 1..348: mol_type = other DNA
gaggtgcagctggtggagtctgggggaggcttggtgcaggctggggggtctctgagactctcttgtgcagcctctggaagcatcttcaggttccctcccatgggttggtaccgccaggctccagggaaacagcgcgagcaggtcgcacagcttactagtggtggcagtacaaactatgcagactccgtcaagggccgattcaccatctccagagacaacgccaaaaacacgtggtatctgcaaatgagcagcctgagacctgaggacacggccgtctattactgttctgtgctaggaagagataggatgacatactggggccaggggacccaggtcaccgtctcctca

SEQ ID NO: 3900 - DNA, 348 bp, synthetic construct
  source 1..348: mol_type = other DNA
gaggtgcagctggtggagtctgggggaggcttggtgcaggctggggggtctctgagactctcttgtgcagcctctggaagcatcttcaggttccctcccatgggttggtaccgccaggctccagggaaacagcgcgagcaggtcgcacagcttactagtggtggcagtacaaactatgcagactccgtcaagggccgattcaccatctccagagacaacgccaaaaacacgtggtatctgcaaatgagcagcctgagacctgaggacacggccgtctattactgttctgtgctaggaagatatatgatgacatactggggccaggggacccaggtcaccgtctcctca

SEQ ID NO: 3901 - DNA, 348 bp, synthetic construct
  source 1..348: mol_type = other DNA
gaggtgcagctggtggagtctgggggaggcttggtgcaggctggggggtctctgagactctcttgtgcagcctctggaagcatcttcaggttccctcccatgggttggtaccgccaggctccagggaaacagcgcgagcaggtcgcgcagcttactagtggtggcagtacaaactatgcagactccgtcaagggccgattcaccatctccagagacaacgccaaaaacacgtggtatctgcaaatgagcagcctgagacctgaggacacggccgtctattactgttctgtgctaggaagagatatgatgacatcctggggccaggggacccaggtcaccgtctcctca

SEQ ID NO: 3902 - DNA, 348 bp, synthetic construct
  source 1..348: mol_type = other DNA
gaggtgcagctggtggagtctgggggaggcttggtgcaggctggggggtctctgagactctcttgtgcagcctctggaagcatcttcaggttccctcccatgggttggtaccgccaggctccagggaaacagcgcgagcaggtcgcacagcttactagtggtggcagtacaaactatgcagactccgtcaagggccgattcaccatctccagagacaacgccaaaaacacgtggtatctgcaaatgagcagcctgagacctgaggacacggccgtctattactgttctgtgctaggaagagatatgatggcatactggggccaggggacccaggtcaccgtctcctca

SEQ ID NO: 3903 - DNA, 348 bp, synthetic construct
  source 1..348: mol_type = other DNA
gaggtgcagctggtggagtctgggggaggcttggtgcaggctggggggtctctgagactctcttgtgcagcctctggaagcatcttcaggttccctcccatgggttggtaccgccaggctccagggaaacagcgcgagcaggtcgcacagcttactagtggtggcagtacaaactatgcagactccgtcaagggccgattcaccatctccagagacaacgccaaaaacacgtggtatctgcaaatgagcagcctgagacctgaggacacggccgtctattactgttctgtgctaggaagagatatgatgccatactggggccaggggacccaggtcaccgtctcctca

SEQ ID NO: 3904 - DNA, 348 bp, synthetic construct
  source 1..348: mol_type = other DNA
gaggtgcagctggtggagtctgggggaggcttggtgcaggctggggggtctctgagactctcttgtgcagcctctggaagcatcttcaggttccctcccatgggttggtaccgccaggctccagggaaacagcgcgagcaagtcgcacagcttactagtggtggcagtacaaactatgcagactccgtcaagggccgattcaccatctccagagacaacgccaaaaacacgtggtatctgcaaatgagcagcctgagacctgaggacacggccgtctattactgttctgtgctaggaagagatatgatcacatactggggccaggggacccaggtcaccgtctcctca

SEQ ID NO: 3905 - DNA, 348 bp, synthetic construct
  source 1..348: mol_type = other DNA
gaggtgcagctggtggagtctgggggaggcttggtgcaggctggggggtctctgagactctcttgtgcagcctctggaagcatcttcaggttccctcccatgggttggtaccgccaggctccagggaaacagcgcgagcaggtcgcacagcttactagtggtggcagtacaaactatgcagactccgtcaagggccgattcaccatctccagagacaacgccaaaaacacgtggtatctgcaaatgagcagcctgagacctgaggacacggccgtctattactgtactgttctcggaagagatatgatgacatactggggccaggggacccaggtcaccgtctcctca

SEQ ID NO: 3906 - DNA, 348 bp, synthetic construct
  source 1..348: mol_type = other DNA
gaggtgcagctggtggagtctgggggagacttggtgcaggctggggggtctctgagactctcctgtgcagcctctggaagcatcttcaggttccctcccatgggttggtaccgccaggctccagggaaacagcgcgagcaggtcgcacagcttactagtggtggcagtacaaactatgcagactccgtcaagggccgattcaccatctccagagacaacgccaaaaacacgtggtatctgcaaatgagcagcctgagacctgaggacacggccgtctattactgttctgtgctaggaagagataagatgacatactggggccaggggacccaggtcaccgtctcctca

SEQ ID NO: 3907 - DNA, 348 bp, synthetic construct
  source 1..348: mol_type = other DNA
gaggtgcagctggtggagtctgggggaggcttggtgcaggctggggggtctctgagactctcttgtgcagcctctggaagcaccttcaggttccctcccatgggttggtaccgccaggctccagggaaacagcgcgagcaggtcgcacagcttactagtggtggcagtacaaactatgcagactccgtcaagggccgattcaccatctccagagacaacgccaaaaacacgtggtatctgcaaatgagcagcctgagacctgaggacacggccgtctattactgttatgtgctaggaagagatatgatgacatactggggccaggggacccaggtcaccgtctcctca

SEQ ID NO: 3908 - DNA, 348 bp, synthetic construct
  source 1..348: mol_type = other DNA
gaggtgcagctggtggagtctgggggaggcttggtgcaggctggggggtctctgagactctcttgtgcagcctctggaagcatcttcaggttccctcccatgggttggtaccgccaggctccagggaaacagcgcgagcaggtcgcacagcttactagtggtggcagtacaaactatgcagactccgtcaagggccgattcaccatctccagagacaacgccaaaaacacgtggtatctgcaaatgagcagcctgagacctgaggacacggccgtctattactgttctgtgctaggaagagatatgatgacacactggggccaggggacccaggtcaccgtctcctca

SEQ ID NO: 3909 - DNA, 348 bp, synthetic construct
  source 1..348: mol_type = other DNA
gaggtgcagctggtggagtctgggggaggcttggtgcaggctggggggtctctgagactctcttgtgcagcctctggaagcatcttcaggttccctcccatgggttggtaccgccaggctccagggaaacagcgcgagcaggtcgcacagcttactagtggtggcagtacaaactatgcagactccgtcaagggccgattcaccatctccagagacaacgccaaaaacacgtggtatctgcaaatgagcagcctgagacctgaggacacggccgtctattactgttttgtgctaggaagagatatgatgacatactggggccaggggacccaggtcaccgtctcctca

SEQ ID NO: 3910 - DNA, 348 bp, synthetic construct
  source 1..348: mol_type = other DNA
gaggtgcagctggtggagtctgggggaggcttggtgcaggctggggggtctctgagactctcttgtgcagcctctggaagcaccttcaggttccctcccatgggttggtaccgccaggctccagggaaacagcgcgagcaggtcgcacagcttactagcggtggcagtacaaactatgcagactccgtcaagggccgattcaccatctccagagacaacgccaaaaacacgtggtatctgcaaatgagcagcctgagacctgaggacacggccgtctattactgttctgtgctaggaagagatatgaggacatactggggccaggggacccaggtcaccgtctcctca

SEQ ID NO: 3911 - DNA, 348 bp, synthetic construct
  source 1..348: mol_type = other DNA
gaggtgcagctggtggagtctgggggaggctcggtgcaggctggggggtctctgaggctctcctgtgcagcctctggaagcatcttcaggttccctcccatgggttggtaccgccaggctccagggaaacagcgcgagcaggtcgcacagcttactagtggtggcagtacaaactatgcagactccgtcaagggccgattcaccatctccagagacaacgccaaaaacacgtggtatctgcaaatgagcagcctgagacctgaggacacggccgtctattactgttatgtgctaggaagagatatgatgacatactggggccaggggacccaggtcaccgtctcctca

SEQ ID NO: 3912 - DNA, 348 bp, synthetic construct
  source 1..348: mol_type = other DNA
gaggtgcagctggtggagtctgggggaggctcggtgcaggctggggggtctctgagactctcttgtgcagcctctggaagcatcttcaggttccctcccatgggttggtaccgccaggctccagggaaacagcgcgagcaggtcgcacagcttactagtggtggcagtacaaactatgcagactccgtcaagggccgattcaccatctccagagacaacgccaaaaacacgtggtatctgcaaatgagcagcctgagacctgaggacacggccgtctattactgttctgtgctaggaagagataagatgacatactggggccaggggacccaggtcaccgtctcctca

SEQ ID NO: 3913 - DNA, 348 bp, synthetic construct
  source 1..348: mol_type = other DNA
gaggtgcagctggtggagtctgggggaggcttggtgcaggctggggggtctctgagactctcttgtgcagcctctggaagcatcttcaggttccctcccatgggttggtaccgccaggctccagggaaacagcgcgagcaggtcgcacagcttactagtggtggcagtacaaactatgcagactccgtcaagggccgattcaccatctccagagacaacgccaaaaacacgtgggatctgcaaatgagcagcctgagacctgaggacacggccgtctattactgttctgtgctaggaagagatatgatgacagactggggccaggggacccaggtcaccgtctcctca

SEQ ID NO: 3914 - DNA, 348 bp, synthetic construct
  source 1..348: mol_type = other DNA
gaggtgcagctggtggagtctgggggagacttggtgcaggctggggggtctctgagactctcctgtgcagcctctggaagcatcttcaggttccctcccatgggttggtaccgccaggctccagggaaacagcgcgagcaggtcgcacagcttactagtggtggcagtacaaactatgcagactccgtcaagggccgattcaccatctccagagacaacgccaaaaacacgtggtatctgcaaatgagcagcctgagacctgaggacacggccgtctattactgttctgtgctaggaagagatatgatgacagactggggccaggggacccaggtcaccgtctcctca

SEQ ID NO: 3915 - DNA, 348 bp, synthetic construct
  source 1..348: mol_type = other DNA
gaggtgcagctggtggagtctgggggagacttggtgcaggctggggggtctctgagactctcttgtgcagcctctggaagcatcttcaggttccctcccatgggttggtaccgccaggctccagggaaacagcgcgagcaggtcgcacagcttactagtggtggcagtacaaactatgcagactccgtcaagggccgattcaccatctccagagacaacgccaaaaacacgtggtatctgcaaatgagcagcctgagacctgaggacacggccgtctattactgtgctgtgctaggaagagatatgatgacatactggggccaggggacccaggtcaccgtctcctca

SEQ ID NO: 3916 - DNA, 348 bp, synthetic construct
  source 1..348: mol_type = other DNA
gaggtgcagctggtggagtctgggggaggcttggtgcaggctggggggtctctgagactctcttgtgcagcctctggaagcatcttcaggttccctcccatgggttggtaccgccaggctccagggaaacagcgcgagcaggtcgcacagcttactagtggtggcagtacaaactatgcagactccgtcaagggccgattcaccatctccagagacaacgccaaaaacacgtggtatctgcaaatgagcagcctgagacctgaggacacggccgtatattactgttctgtgctaggaagagaaatgatgacatactggggccaggggacccaggtcaccgtctcctca

SEQ ID NO: 3917 - DNA, 348 bp, synthetic construct
  source 1..348: mol_type = other DNA
gaggtgcagctggtggagtctgggggaggcttggtgcaggctggggggtctctgagactctcttgtgcagcctctggaagcatcttcaggttccctcccatgggttggtaccgccaggctccagggaaacagcgcgagcaggtcgcacagcttactagtggtggcagtacaaactatgcagactccgtcaagggccgattcaccatctccagagacaacgccaaaaacacgtggtatctgcaaatgagcagcctgagacctgaggacacggccgtctattactgttctgtgctaggaagagttatgatgacatactggggccaggggacccaggtcaccgtctcctca

SEQ ID NO: 3918 - DNA, 348 bp, synthetic construct
  source 1..348: mol_type = other DNA
gaggtgcagctggtggagtctgggggaggcttggtgcaggctggggggtctctgagactctcatgtgcagcctctggaagcatcttcaggttccctcccatgggttggtaccgccaggctccagggaaacagcgcgagcaggtcgcacagcttactagtggtggcagtacaaactatgcagactccgtcaagggccgattcaccatctccagagacaacgccaaaaacacgtggtatctgcaaatgagcagcctgaggcctgaggacacggccgtctattactgttctgtgctaggaagagatatgatgtcatactggggccaggggacccaggtcaccgtctcctca

SEQ ID NO: 3919 - DNA, 348 bp, synthetic construct
  source 1..348: mol_type = other DNA
gaggtgcagctggtggagtctgggggaggcttggtgcaggctggggggtctctgagactctcttgtgcagcctctggaagcatcttcaggttccctcccatgggttggtaccgccaggctccagggaaacagcgcgagcaggtcgcacagcttactagtggtggcagtacaaactatgcagactccgtcaagggccgattcaccatctccagagacaacgccaaaaacacgtggtatctgcaaatgagcagcctgagacctgaggacacggccgtctattactgttctgtgctaggaagagatatgatgaaatactggggccaggggacccaggtcaccgtctcctca

SEQ ID NO: 3920 - DNA, 348 bp, synthetic construct
  source 1..348: mol_type = other DNA
gaggtgcagctggtggagtctgggggaggcttggtgcaggctggggggtctctgagactctcttgtgcagcctctggaagcatcttcaggttccctcccatgggttggtaccgccaggctccagggaaacagcgcgagcaggtcgcacagcttactagtggtggcagtacaaactatgcagactccgtcaagggccgattcaccatctccagagacaacgccaaaaacacgtggtatctgcaaatgagcagcctgagacctgaggacacggccgtctattactgttctgtgctaggaatagatatgatgacatactggggccaggggacccaggtcaccgtctcctca

SEQ ID NO: 3921 - DNA, 348 bp, synthetic construct
  source 1..348: mol_type = other DNA
gaggtgcagctggtggagtctgggggaggcttggtgcaggctggggggtctctgagactctcttgtgcagcctctggaagcatcttcaggttccctcccatgggttggtaccgccaggctccagggaaacagcgcgagcaggtcgcacagcttactagtggtggcagtacaaactatgcagactccgtcaagggccgattcaccatctccagagacaacgccaaaaacacgtggtatctgcaaatgagcagcctgagacctgaggacacggccgtctattactgttctgtgctaagaagagatatgatgacatactggggccaggggacccaggtcaccgtctcctca

SEQ ID NO: 3922 - DNA, 348 bp, synthetic construct
  source 1..348: mol_type = other DNA
gaggtgcagctggtggagtctgggggaggcttggtgcaggctggggggtctctgagactctcctgtgcagcctctggaagcatcttcaggttccctcccatgggttggtaccgccaggctccagggaaacagcgcgagcaggtcgcacagcttactagtggtggcagtacaaactatgcagactccgtcaagggccgattcaccatctccagagacaacgccaaaaacacgtggtatctgcaaatgagcagcctgagacctgaggacacggccgtctattactgttctgtgctaggaagagatatggtgacatactggggccaggggacccaggtcaccgtctcctca

SEQ ID NO: 3923 - protein, 14 aa, synthetic construct
EPKSSDKTHTCPPC

SEQ ID NO: 3924 - protein, 9 aa, synthetic construct
DKTHTCPPC

SEQ ID NO: 3925 - protein, 11 aa, synthetic construct
ESKYGPPCPPC

SEQ ID NO: 3926 - protein, 133 aa, unidentified [sequence omitted]

SEQ ID NO: 3927 - protein, 133 aa, synthetic construct
APTSSSTKKTQLQLEHLLLDLQMILNGINNYKNPKLTRMLTFKFYMPKKATELKHLQCLEEELKPLEEVLNLAQSKNFHLRPRDLISDINVIVLELKGSETTFMCEYADETATIVEFLNRWITFCQSIISTLT

SEQ ID NO: 3928 - protein, 24 aa, unidentified
MAVMAPRTLVLLLSGALALTQTWA

SEQ ID NO: 3929 - protein, 20 aa, unidentified
MYRMQLLSCIALSLALVTNS

SEQ ID NO: 3930-3932 - skipped (3 entries)

SEQ ID NO: 3933 - protein, 501 aa, synthetic construct
EVQLVESGGGLVQAGGSLRLSCAASGSIVSTNGMGWHRQVPGKGRELVAGIRSDGFTNYADSVKGRFTISSDNVKNTVYLQMNSLKAEDSGVYFCYYQALSSPNYGQTFWGQGTQVTVSSGGGGSGGGGSGGGGSEVQLVESGGGLVQAGGSLRLSCAASGSIVSTNGMGWHRQVPGKGRELVAGIRSDGFTNYADSVKGRFTISSDNVKNTVYLQMNSLKAEDSGVYFCYYQALSSPNYGQTFWGQGTQVTVSSGGGGSESKYGPPCPSCPESKYGPPCPPCPAPEFEGGPSVFLFPPKPKDTLMISRTPEVTCVVVDVSQEDPEVQFNWYVDGVEVHNAKTKPREEQFNSTYRVVSVLTVLHQDWLNGKEYKCKVSNKGLGSSIEKTISKAKGQPREPQVYTLPPSQEEMTKNQVSLTCLVKGFYPSDIAVEWESNGQPENNYKTTPPVLDSDGSFFLYSRLTVDKSRWQEGNVFSCSVMHEALHNHYTQKSLSLSLGK

SEQ ID NO: 3934 - protein, 489 aa, synthetic construct
EVQLVESGGGLVQAGGSLRLSCAASGSIVSTNGMGWHRQVPGKGRELVAGIRSDGFTNYADSVKGRFTISSDNVKNTVYLQMNSLKAEDSGVYFCYYQALSSPNYGQTFWGQGTQVTVSSGGGGSGGGGSGGGGSEVQLVESGGGLVQAGGSLRLSCAASGSIVSTNGMGWHRQVPGKGRELVAGIRSDGFTNYADSVKGRFTISSDNVKNTVYLQMNSLKAEDSGVYFCYYQALSSPNYGQTFWGQGTQVTVSSGGGGSESKYGPPCPPCPAPEFEGGPSVFLFPPKPKDTLMISRTPEVTCVVVDVSQEDPEVQFNWYVDGVEVHNAKTKPREEQFNSTYRVVSVLTVLHQDWLNGKEYKCKVSNKGLGSSIEKTISKAKGQPREPQVYTLPPSQEEMTKNQVSLTCLVKGFYPSDIAVEWESNGQPENNYKTTPPVLDSDGSFFLYSRLTVDKSRWQEGNVFSCSVMHEALHNHYTQKSLSLSLGK

SEQ ID NO: 3935 - protein, 496 aa, synthetic construct
EVQLVESGGGLVQAGGSLRLSCAASGSIVSTNGMGWHRQVPGKGRELVAGIRSDGFTNYADSVKGRFTISSDNVKNTVYLQMNSLKAEDSGVYFCYYQALSSPNYGQTFWGQGTQVTVSSGGGGSESKYGPPCPSCPESKYGPPCPPCPAPEFEGGPSVFLFPPKPKDTLMISRTPEVTCVVVDVSQEDPEVQFNWYVDGVEVHNAKTKPREEQFNSTYRVVSVLTVLHQDWLNGKEYKCKVSNKGLGSSIEKTISKAKGQPREPQVYTLPPSQEEMTKNQVSLTCLVKGFYPSDIAVEWESNGQPENNYKTTPPVLDSDGSFFLYSRLTVDKSRWQEGNVFSCSVMHEALHNHYTQKSLSLSLGKGGGGSGGGGSEVQLVESGGGLVQAGGSLRLSCAASGSIVSTNGMGWHRQVPGKGRELVAGIRSDGFTNYADSVKGRFTISSDNVKNTVYLQMNSLKAEDSGVYFCYYQALSSPNYGQTFWGQGTQVTVSS

SEQ ID NO: 3936 - protein, 484 aa, synthetic construct
EVQLVESGGGLVQAGGSLRLSCAASGSIVSTNGMGWHRQVPGKGRELVAGIRSDGFTNYADSVKGRFTISSDNVKNTVYLQMNSLKAEDSGVYFCYYQALSSPNYGQTFWGQGTQVTVSSGGGGSESKYGPPCPPCPAPEFEGGPSVFLFPPKPKDTLMISRTPEVTCVVVDVSQEDPEVQFNWYVDGVEVHNAKTKPREEQFNSTYRVVSVLTVLHQDWLNGKEYKCKVSNKGLGSSIEKTISKAKGQPREPQVYTLPPSQEEMTKNQVSLTCLVKGFYPSDIAVEWESNGQPENNYKTTPPVLDSDGSFFLYSRLTVDKSRWQEGNVFSCSVMHEALHNHYTQKSLSLSLGKGGGGSGGGGSEVQLVESGGGLVQAGGSLRLSCAASGSIVSTNGMGWHRQVPGKGRELVAGIRSDGFTNYADSVKGRFTISSDNVKNTVYLQMNSLKAEDSGVYFCYYQALSSPNYGQTFWGQGTQVTVSS

SEQ ID NO: 3937 - protein, 509 aa, synthetic construct
APTSSSTKKTQLQLEHLLLDLQMILNGINNYKNPKLTRMLTFKFYMPKKATELKHLQCLEEELKPLEEVLNLAQSKNFHLRPRDLISDINVIVLELKGSETTFMCEYADETATIVEFLNRWITFCQSIISTLTGGGGSGGGGSGGGGSGGGGSDKTHTCPPCPAPEAAGAPSVFLFPPKPKDTLMISRTPEVTCVVVDVSHEDPEVKFNWYVDGVEVHNAKTKPREEQYNSTYRVVSVLTVLHQDWLNGKEYKCKVSNKALPAPIEKTISKAKGQPREPQVYTLPPSREEMTKNQVSLTCLVKGFYPSDIAVEWESNGQPENNYKTTPPVLDSDGSFFLYSKLTVDKSRWQQGNVFSCSVMHEALHNHYTQKSLSLSPGGGGGSGGGGSEVQLVESGGGLVQAGGSLRLSCAASGSIVSTNGMGWHRQVPGKGRELVAGIRSDGFTNYADSVKGRFTISSDNVKNTVYLQMNSLKAEDSGVYFCYYQALSSPNYGQTFWGQGTQVTVSS

SEQ ID NO: 3938 - protein, 267 aa, synthetic construct
EVQLVESGGGLVQAGGSLRLSCAASGSIVSTNGMGWHRQVPGKGRELVAGIRSDGFTNYADSVKGRFTISSDNVKNTVYLQMNSLKAEDSGVYFCYYQALSSPNYGQTFWGQGTQVTVSSGGGGSPAPAPAPAPAPAPAPAPGGGGSEVQLVESGGGLVQAGGSLRLSCAASGSIVSTNGMGWHRQVPGKGRELVAGIRSDGFTNYADSVKGRFTISSDNVKNTVYLQMNSLKAEDSGVYFCYYQALSSPNYGQTFWGQGTQVTVSS

SEQ ID NO: 3939 - protein, 511 aa, synthetic construct
EVQLVESGGGLAQPGGSLRLSCAASGFTFSRYAMSWARQAPGKGLEWVSGISDDGSDTYYADSVKGRFTISRDNAKNTVYLQMNSLKPEDTALYYCAKDAGSWGTGPFGYEYDYWGQGTQVTVSSGGGGSGGGGSGGGGSEVQLVESGGGLAQPGGSLRLSCAASGFTFSRYAMSWARQAPGKGLEWVSGISDDGSDTYYADSVKGRFTISRDNAKNTVYLQMNSLKPEDTALYYCAKDAGSWGTGPFGYEYDYWGQGTQVTVSSGGGGSESKYGPPCPSCPESKYGPPCPPCPAPEFEGGPSVFLFPPKPKDTLMISRTPEVTCVVVDVSQEDPEVQFNWYVDGVEVHNAKTKPREEQFNSTYRVVSVLTVLHQDWLNGKEYKCKVSNKGLGSSIEKTISKAKGQPREPQVYTLPPSQEEMTKNQVSLTCLVKGFYPSDIAVEWESNGQPENNYKTTPPVLDSDGSFFLYSRLTVDKSRWQEGNVFSCSVMHEALHNHYTQKSLSLSLGK

SEQ ID NO: 3940 - protein, 499 aa, synthetic construct
EVQLVESGGGLAQPGGSLRLSCAASGFTFSRYAMSWARQAPGKGLEWVSGISDDGSDTYYADSVKGRFTISRDNAKNTVYLQMNSLKPEDTALYYCAKDAGSWGTGPFGYEYDYWGQGTQVTVSSGGGGSGGGGSGGGGSEVQLVESGGGLAQPGGSLRLSCAASGFTFSRYAMSWARQAPGKGLEWVSGISDDGSDTYYADSVKGRFTISRDNAKNTVYLQMNSLKPEDTALYYCAKDAGSWGTGPFGYEYDYWGQGTQVTVSSGGGGSESKYGPPCPPCPAPEFEGGPSVFLFPPKPKDTLMISRTPEVTCVVVDVSQEDPEVQFNWYVDGVEVHNAKTKPREEQFNSTYRVVSVLTVLHQDWLNGKEYKCKVSNKGLGSSIEKTISKAKGQPREPQVYTLPPSQEEMTKNQVSLTCLVKGFYPSDIAVEWESNGQPENNYKTTPPVLDSDGSFFLYSRLTVDKSRWQEGNVFSCSVMHEALHNHYTQKSLSLSLGK

SEQ ID NO: 3941 - protein, 506 aa, synthetic construct
EVQLVESGGGLAQPGGSLRLSCAASGFTFSRYAMSWARQAPGKGLEWVSGISDDGSDTYYADSVKGRFTISRDNAKNTVYLQMNSLKPEDTALYYCAKDAGSWGTGPFGYEYDYWGQGTQVTVSSGGGGSESKYGPPCPSCPESKYGPPCPPCPAPEFEGGPSVFLFPPKPKDTLMISRTPEVTCVVVDVSQEDPEVQFNWYVDGVEVHNAKTKPREEQFNSTYRVVSVLTVLHQDWLNGKEYKCKVSNKGLGSSIEKTISKAKGQPREPQVYTLPPSQEEMTKNQVSLTCLVKGFYPSDIAVEWESNGQPENNYKTTPPVLDSDGSFFLYSRLTVDKSRWQEGNVFSCSVMHEALHNHYTQKSLSLSLGKGGGGSGGGGSEVQLVESGGGLAQPGGSLRLSCAASGFTFSRYAMSWARQAPGKGLEWVSGISDDGSDTYYADSVKGRFTISRDNAKNTVYLQMNSLKPEDTALYYCAKDAGSWGTGPFGYEYDYWGQGTQVTVSS

SEQ ID NO: 3942 - protein, 494 aa, synthetic construct
EVQLVESGGGLAQPGGSLRLSCAASGFTFSRYAMSWARQAPGKGLEWVSGISDDGSDTYYADSVKGRFTISRDNAKNTVYLQMNSLKPEDTALYYCAKDAGSWGTGPFGYEYDYWGQGTQVTVSSGGGGSESKYGPPCPPCPAPEFEGGPSVFLFPPKPKDTLMISRTPEVTCVVVDVSQEDPEVQFNWYVDGVEVHNAKTKPREEQFNSTYRVVSVLTVLHQDWLNGKEYKCKVSNKGLGSSIEKTISKAKGQPREPQVYTLPPSQEEMTKNQVSLTCLVKGFYPSDIAVEWESNGQPENNYKTTPPVLDSDGSFFLYSRLTVDKSRWQEGNVFSCSVMHEALHNHYTQKSLSLSLGKGGGGSGGGGSEVQLVESGGGLAQPGGSLRLSCAASGFTFSRYAMSWARQAPGKGLEWVSGISDDGSDTYYADSVKGRFTISRDNAKNTVYLQMNSLKPEDTALYYCAKDAGSWGTGPFGYEYDYWGQGTQVTVSS

SEQ ID NO: 3943 - protein, 514 aa, synthetic construct
APTSSSTKKTQLQLEHLLLDLQMILNGINNYKNPKLTRMLTFKFYMPKKATELKHLQCLEEELKPLEEVLNLAQSKNFHLRPRDLISDINVIVLELKGSETTFMCEYADETATIVEFLNRWITFCQSIISTLTGGGGSGGGGSGGGGSGGGGSDKTHTCPPCPAPEAAGAPSVFLFPPKPKDTLMISRTPEVTCVVVDVSHEDPEVKFNWYVDGVEVHNAKTKPREEQYNSTYRVVSVLTVLHQDWLNGKEYKCKVSNKALPAPIEKTISKAKGQPREPQVYTLPPSREEMTKNQVSLTCLVKGFYPSDIAVEWESNGQPENNYKTTPPVLDSDGSFFLYSKLTVDKSRWQQGNVFSCSVMHEALHNHYTQKSLSLSPGGGGGSGGGGSEVQLVESGGGLAQPGGSLRLSCAASGFTFSRYAMSWARQAPGKGLEWVSGISDDGSDTYYADSVKGRFTISRDNAKNTVYLQMNSLKPEDTALYYCAKDAGSWGTGPFGYEYDYWGQGTQVTVSS

SEQ ID NO: 3944 - protein, 277 aa, synthetic construct
EVQLVESGGGLAQPGGSLRLSCAASGFTFSRYAMSWARQAPGKGLEWVSGISDDGSDTYYADSVKGRFTISRDNAKNTVYLQMNSLKPEDTALYYCAKDAGSWGTGPFGYEYDYWGQGTQVTVSSGGGGSPAPAPAPAPAPAPAPAPGGGGSEVQLVESGGGLAQPGGSLRLSCAASGFTFSRYAMSWARQAPGKGLEWVSGISDDGSDTYYADSVKGRFTISRDNAKNTVYLQMNSLKPEDTALYYCAKDAGSWGTGPFGYEYDYWGQGTQVTVSS

SEQ ID NO: 3945 - protein, 501 aa, synthetic construct
EVQLVESGGGLVQAGGSLRVSCAASGSIFRADAMGWHRQVPGKPREFVAGIRSDGFTNYAEAVKGRFTISWDTVKNTVYLQMNSLKPEDTAVYTCYYQSLSSPNYGQVFWGQGTQVTVSSGGGGSGGGGSGGGGSEVQLVESGGGLVQAGGSLRVSCAASGSIFRADAMGWHRQVPGKPREFVAGIRSDGFTNYAEAVKGRFTISWDTVKNTVYLQMNSLKPEDTAVYTCYYQSLSSPNYGQVFWGQGTQVTVSSGGGGSESKYGPPCPSCPESKYGPPCPPCPAPEFEGGPSVFLFPPKPKDTLMISRTPEVTCVVVDVSQEDPEVQFNWYVDGVEVHNAKTKPREEQFNSTYRVVSVLTVLHQDWLNGKEYKCKVSNKGLGSSIEKTISKAKGQPREPQVYTLPPSQEEMTKNQVSLTCLVKGFYPSDIAVEWESNGQPENNYKTTPPVLDSDGSFFLYSRLTVDKSRWQEGNVFSCSVMHEALHNHYTQKSLSLSLGK

SEQ ID NO: 3946 - protein, 489 aa, synthetic construct
EVQLVESGGGLVQAGGSLRVSCAASGSIFRADAMGWHRQVPGKPREFVAGIRSDGFTNYAEAVKGRFTISWDTVKNTVYLQMNSLKPEDTAVYTCYYQSLSSPNYGQVFWGQGTQVTVSSGGGGSGGGGSGGGGSEVQLVESGGGLVQAGGSLRVSCAASGSIFRADAMGWHRQVPGKPREFVAGIRSDGFTNYAEAVKGRFTISWDTVKNTVYLQMNSLKPEDTAVYTCYYQSLSSPNYGQVFWGQGTQVTVSSGGGGSESKYGPPCPPCPAPEFEGGPSVFLFPPKPKDTLMISRTPEVTCVVVDVSQEDPEVQFNWYVDGVEVHNAKTKPREEQFNSTYRVVSVLTVLHQDWLNGKEYKCKVSNKGLGSSIEKTISKAKGQPREPQVYTLPPSQEEMTKNQVSLTCLVKGFYPSDIAVEWESNGQPENNYKTTPPVLDSDGSFFLYSRLTVDKSRWQEGNVFSCSVMHEALHNHYTQKSLSLSLGK

SEQ ID NO: 3947 - protein, 496 aa, synthetic construct
EVQLVESGGGLVQAGGSLRVSCAASGSIFRADAMGWHRQVPGKPREFVAGIRSDGFTNYAEAVKGRFTISWDTVKNTVYLQMNSLKPEDTAVYTCYYQSLSSPNYGQVFWGQGTQVTVSSGGGGSESKYGPPCPSCPESKYGPPCPPCPAPEFEGGPSVFLFPPKPKDTLMISRTPEVTCVVVDVSQEDPEVQFNWYVDGVEVHNAKTKPREEQFNSTYRVVSVLTVLHQDWLNGKEYKCKVSNKGLGSSIEKTISKAKGQPREPQVYTLPPSQEEMTKNQVSLTCLVKGFYPSDIAVEWESNGQPENNYKTTPPVLDSDGSFFLYSRLTVDKSRWQEGNVFSCSVMHEALHNHYTQKSLSLSLGKGGGGSGGGGSEVQLVESGGGLVQAGGSLRVSCAASGSIFRADAMGWHRQVPGKPREFVAGIRSDGFTNYAEAVKGRFTISWDTVKNTVYLQMNSLKPEDTAVYTCYYQSLSSPNYGQVFWGQGTQVTVSS

SEQ ID NO: 3948 - protein, 484 aa, synthetic construct
EVQLVESGGGLVQAGGSLRVSCAASGSIFRADAMGWHRQVPGKPREFVAGIRSDGFTNYAEAVKGRFTISWDTVKNTVYLQMNSLKPEDTAVYTCYYQSLSSPNYGQVFWGQGTQVTVSSGGGGSESKYGPPCPPCPAPEFEGGPSVFLFPPKPKDTLMISRTPEVTCVVVDVSQEDPEVQFNWYVDGVEVHNAKTKPREEQFNSTYRVVSVLTVLHQDWLNGKEYKCKVSNKGLGSSIEKTISKAKGQPREPQVYTLPPSQEEMTKNQVSLTCLVKGFYPSDIAVEWESNGQPENNYKTTPPVLDSDGSFFLYSRLTVDKSRWQEGNVFSCSVMHEALHNHYTQKSLSLSLGKGGGGSGGGGSEVQLVESGGGLVQAGGSLRVSCAASGSIFRADAMGWHRQVPGKPREFVAGIRSDGFTNYAEAVKGRFTISWDTVKNTVYLQMNSLKPEDTAVYTCYYQSLSSPNYGQVFWGQGTQVTVSS

SEQ ID NO: 3949 - protein, 509 aa, synthetic construct
APTSSSTKKTQLQLEHLLLDLQMILNGINNYKNPKLTRMLTFKFYMPKKATELKHLQCLEEELKPLEEVLNLAQSKNFHLRPRDLISDINVIVLELKGSETTFMCEYADETATIVEFLNRWITFCQSIISTLTGGGGSGGGGSGGGGSGGGGSDKTHTCPPCPAPEAAGAPSVFLFPPKPKDTLMISRTPEVTCVVVDVSHEDPEVKFNWYVDGVEVHNAKTKPREEQYNSTYRVVSVLTVLHQDWLNGKEYKCKVSNKALPAPIEKTISKAKGQPREPQVYTLPPSREEMTKNQVSLTCLVKGFYPSDIAVEWESNGQPENNYKTTPPVLDSDGSFFLYSKLTVDKSRWQQGNVFSCSVMHEALHNHYTQKSLSLSPGGGGGSGGGGSEVQLVESGGGLVQAGGSLRVSCAASGSIFRADAMGWHRQVPGKPREFVAGIRSDGFTNYAEAVKGRFTISWDTVKNTVYLQMNSLKPEDTAVYTCYYQSLSSPNYGQVFWGQGTQVTVSS

SEQ ID NO: 3950 - protein, 267 aa, synthetic construct
EVQLVESGGGLVQAGGSLRVSCAASGSIFRADAMGWHRQVPGKPREFVAGIRSDGFTNYAEAVKGRFTISWDTVKNTVYLQMNSLKPEDTAVYTCYYQSLSSPNYGQVFWGQGTQVTVSSGGGGSPAPAPAPAPAPAPAPAPGGGGSEVQLVESGGGLVQAGGSLRVSCAASGSIFRADAMGWHRQVPGKPREFVAGIRSDGFTNYAEAVKGRFTISWDTVKNTVYLQMNSLKPEDTAVYTCYYQSLSSPNYGQVFWGQGTQVTVSS

SEQ ID NO: 3951 - protein, 497 aa, synthetic construct
EVQLVESGGGLVQAGGSLRLSCAASGRTFSDYGMGWFRQAPGKDSEFVAAINWSNGRTNYADSVKGRFTISRDNAKNTGYLEMNSLKVEDTAVYYCAATPSGKAYSYWGQGTQVTVSSGGGGSGGGGSGGGGSEVQLVESGGGLVQAGGSLRLSCAASGRTFSDYGMGWFRQAPGKDSEFVAAINWSNGRTNYADSVKGRFTISRDNAKNTGYLEMNSLKVEDTAVYYCAATPSGKAYSYWGQGTQVTVSSGGGGSESKYGPPCPSCPESKYGPPCPPCPAPEFEGGPSVFLFPPKPKDTLMISRTPEVTCVVVDVSQEDPEVQFNWYVDGVEVHNAKTKPREEQFNSTYRVVSVLTVLHQDWLNGKEYKCKVSNKGLGSSIEKTISKAKGQPREPQVYTLPPSQEEMTKNQVSLTCLVKGFYPSDIAVEWESNGQPENNYKTTPPVLDSDGSFFLYSRLTVDKSRWQEGNVFSCSVMHEALHNHYTQKSLSLSLGK

SEQ ID NO: 3952 - protein, 485 aa, synthetic construct
EVQLVESGGGLVQAGGSLRLSCAASGRTFSDYGMGWFRQAPGKDSEFVAAINWSNGRTNYADSVKGRFTISRDNAKNTGYLEMNSLKVEDTAVYYCAATPSGKAYSYWGQGTQVTVSSGGGGSGGGGSGGGGSEVQLVESGGGLVQAGGSLRLSCAASGRTFSDYGMGWFRQAPGKDSEFVAAINWSNGRTNYADSVKGRFTISRDNAKNTGYLEMNSLKVEDTAVYYCAATPSGKAYSYWGQGTQVTVSSGGGGSESKYGPPCPPCPAPEFEGGPSVFLFPPKPKDTLMISRTPEVTCVVVDVSQEDPEVQFNWYVDGVEVHNAKTKPREEQFNSTYRVVSVLTVLHQDWLNGKEYKCKVSNKGLGSSIEKTISKAKGQPREPQVYTLPPSQEEMTKNQVSLTCLVKGFYPSDIAVEWESNGQPENNYKTTPPVLDSDGSFFLYSRLTVDKSRWQEGNVFSCSVMHEALHNHYTQKSLSLSLGK

SEQ ID NO: 3953 - protein, 492 aa, synthetic construct
EVQLVESGGGLVQAGGSLRLSCAASGRTFSDYGMGWFRQAPGKDSEFVAAINWSNGRTNYADSVKGRFTISRDNAKNTGYLEMNSLKVEDTAVYYCAATPSGKAYSYWGQGTQVTVSSGGGGSESKYGPPCPSCPESKYGPPCPPCPAPEFEGGPSVFLFPPKPKDTLMISRTPEVTCVVVDVSQEDPEVQFNWYVDGVEVHNAKTKPREEQFNSTYRVVSVLTVLHQDWLNGKEYKCKVSNKGLGSSIEKTISKAKGQPREPQVYTLPPSQEEMTKNQVSLTCLVKGFYPSDIAVEWESNGQPENNYKTTPPVLDSDGSFFLYSRLTVDKSRWQEGNVFSCSVMHEALHNHYTQKSLSLSLGKGGGGSGGGGSEVQLVESGGGLVQAGGSLRLSCAASGRTFSDYGMGWFRQAPGKDSEFVAAINWSNGRTNYADSVKGRFTISRDNAKNTGYLEMNSLKVEDTAVYYCAATPSGKAYSYWGQGTQVTVSS

SEQ ID NO: 3954 - protein, 480 aa, synthetic construct
EVQLVESGGGLVQAGGSLRLSCAASGRTFSDYGMGWFRQAPGKDSEFVAAINWSNGRTNYADSVKGRFTISRDNAKNTGYLEMNSLKVEDTAVYYCAATPSGKAYSYWGQGTQVTVSSGGGGSESKYGPPCPPCPAPEFEGGPSVFLFPPKPKDTLMISRTPEVTCVVVDVSQEDPEVQFNWYVDGVEVHNAKTKPREEQFNSTYRVVSVLTVLHQDWLNGKEYKCKVSNKGLGSSIEKTISKAKGQPREPQVYTLPPSQEEMTKNQVSLTCLVKGFYPSDIAVEWESNGQPENNYKTTPPVLDSDGSFFLYSRLTVDKSRWQEGNVFSCSVMHEALHNHYTQKSLSLSLGKGGGGSGGGGSEVQLVESGGGLVQAGGSLRLSCAASGRTFSDYGMGWFRQAPGKDSEFVAAINWSNGRTNYADSVKGRFTISRDNAKNTGYLEMNSLKVEDTAVYYCAATPSGKAYSYWGQGTQVTVSS

SEQ ID NO: 3955 - protein, 507 aa, synthetic construct
APTSSSTKKTQLQLEHLLLDLQMILNGINNYKNPKLTRMLTFKFYMPKKATELKHLQCLEEELKPLEEVLNLAQSKNFHLRPRDLISDINVIVLELKGSETTFMCEYADETATIVEFLNRWITFCQSIISTLTGGGGSGGGGSGGGGSGGGGSDKTHTCPPCPAPEAAGAPSVFLFPPKPKDTLMISRTPEVTCVVVDVSHEDPEVKFNWYVDGVEVHNAKTKPREEQYNSTYRVVSVLTVLHQDWLNGKEYKCKVSNKALPAPIEKTISKAKGQPREPQVYTLPPSREEMTKNQVSLTCLVKGFYPSDIAVEWESNGQPENNYKTTPPVLDSDGSFFLYSKLTVDKSRWQQGNVFSCSVMHEALHNHYTQKSLSLSPGGGGGSGGGGSEVQLVESGGGLVQAGGSLRLSCAASGRTFSDYGMGWFRQAPGKDSEFVAAINWSNGRTNYADSVKGRFTISRDNAKNTGYLEMNSLKVEDTAVYYCAATPSGKAYSYWGQGTQVTVSS

SEQ ID NO: 3956 - protein, 263 aa, synthetic construct
EVQLVESGGGLVQAGGSLRLSCAASGRTFSDYGMGWFRQAPGKDSEFVAAINWSNGRTNYADSVKGRFTISRDNAKNTGYLEMNSLKVEDTAVYYCAATPSGKAYSYWGQGTQVTVSSGGGGSPAPAPAPAPAPAPAPAPGGGGSEVQLVESGGGLVQAGGSLRLSCAASGRTFSDYGMGWFRQAPGKDSEFVAAINWSNGRTNYADSVKGRFTISRDNAKNTGYLEMNSLKVEDTAVYYCAATPSGKAYSYWGQGTQVTVSS

SEQ ID NO: 3957 - protein, 492 aa, synthetic construct
EVQLVESGGGLVEAGGSLRLSCAASGRTFGSYTMGWFRQAPGREQEFLASIRRTGGSTSYADSVKGRFTISRDNAKKAVYLQMNSLKPEDTAVYYCAAAPTGRAFTYWGQGTQVTVSSGGGGSESKYGPPCPSCPESKYGPPCPPCPAPEFEGGPSVFLFPPKPKDTLMISRTPEVTCVVVDVSQEDPEVQFNWYVDGVEVHNAKTKPREEQFNSTYRVVSVLTVLHQDWLNGKEYKCKVSNKGLGSSIEKTISKAKGQPREPQVYTLPPSQEEMTKNQVSLTCLVKGFYPSDIAVEWESNGQPENNYKTTPPVLDSDGSFFLYSRLTVDKSRWQEGNVFSCSVMHEALHNHYTQKSLSLSLGKGGGGSGGGGSEVQLVESGGGLVEAGGSLRLSCAASGRTFGSYTMGWFRQAPGREQEFLASIRRTGGSTSYADSVKGRFTISRDNAKKAVYLQMNSLKPEDTAVYYCAAAPTGRAFTYWGQGTQVTVSS

SEQ ID NO: 3958 - protein, 480 aa, synthetic construct
EVQLVESGGGLVEAGGSLRLSCAASGRTFGSYTMGWFRQAPGREQEFLASIRRTGGSTSYADSVKGRFTISRDNAKKAVYLQMNSLKPEDTAVYYCAAAPTGRAFTYWGQGTQVTVSSGGGGSESKYGPPCPPCPAPEFEGGPSVFLFPPKPKDTLMISRTPEVTCVVVDVSQEDPEVQFNWYVDGVEVHNAKTKPREEQFNSTYRVVSVLTVLHQDWLNGKEYKCKVSNKGLGSSIEKTISKAKGQPREPQVYTLPPSQEEMTKNQVSLTCLVKGFYPSDIAVEWESNGQPENNYKTTPPVLDSDGSFFLYSRLTVDKSRWQEGNVFSCSVMHEALHNHYTQKSLSLSLGKGGGGSGGGGSEVQLVESGGGLVEAGGSLRLSCAASGRTFGSYTMGWFRQAPGREQEFLASIRRTGGSTSYADSVKGRFTISRDNAKKAVYLQMNSLKPEDTAVYYCAAAPTGRAFTYWGQGTQVTVSS

SEQ ID NO: 3959 - protein, 507 aa, synthetic construct
EVQLVESGGGLVQPGGSLRLSCAASGFTFDDIAMTWVRQAPGKGLEWVSSIYSYGPNTYYADSVKGRFTISTDSAKNTLYLQMNSLKPEDTAVYYCAADSDLSTVVVGPHDYWGQGTQVTVSSGGGGSGGGGSGGGGSEVQLVESGGGLVQPGGSLRLSCAASGFTFDDIAMTWVRQAPGKGLEWVSSIYSYGPNTYYADSVKGRFTISTDSAKNTLYLQMNSLKPEDTAVYYCAADSDLSTVVVGPHDYWGQGTQVTVSSGGGGSESKYGPPCPSCPESKYGPPCPPCPAPEFEGGPSVFLFPPKPKDTLMISRTPEVTCVVVDVSQEDPEVQFNWYVDGVEVHNAKTKPREEQFNSTYRVVSVLTVLHQDWLNGKEYKCKVSNKGLGSSIEKTISKAKGQPREPQVYTLPPSQEEMTKNQVSLTCLVKGFYPSDIAVEWESNGQPENNYKTTPPVLDSDGSFFLYSRLTVDKSRWQEGNVFSCSVMHEALHNHYTQKSLSLSLGK

SEQ ID NO: 3960 - protein, 495 aa, synthetic construct
EVQLVESGGGLVQPGGSLRLSCAASGFTFDDIAMTWVRQAPGKGLEWVSSIYSYGPNTYYADSVKGRFTISTDSAKNTLYLQMNSLKPEDTAVYYCAADSDLSTVVVGPHDYWGQGTQVTVSSGGGGSGGGGSGGGGSEVQLVESGGGLVQPGGSLRLSCAASGFTFDDIAMTWVRQAPGKGLEWVSSIYSYGPNTYYADSVKGRFTISTDSAKNTLYLQMNSLKPEDTAVYYCAADSDLSTVVVGPHDYWGQGTQVTVSSGGGGSESKYGPPCPPCPAPEFEGGPSVFLFPPKPKDTLMISRTPEVTCVVVDVSQEDPEVQFNWYVDGVEVHNAKTKPREEQFNSTYRVVSVLTVLHQDWLNGKEYKCKVSNKGLGSSIEKTISKAKGQPREPQVYTLPPSQEEMTKNQVSLTCLVKGFYPSDIAVEWESNGQPENNYKTTPPVLDSDGSFFLYSRLTVDKSRWQEGNVFSCSVMHEALHNHYTQKSLSLSLGK

SEQ ID NO: 3961 - protein, 502 aa, synthetic construct
EVQLVESGGGLVQPGGSLRLSCAASGFTFDDIAMTWVRQAPGKGLEWVSSIYSYGPNTYYADSVKGRFTISTDSAKNTLYLQMNSLKPEDTAVYYCAADSDLSTVVVGPHDYWGQGTQVTVSSGGGGSESKYGPPCPSCPESKYGPPCPPCPAPEFEGGPSVFLFPPKPKDTLMISRTPEVTCVVVDVSQEDPEVQFNWYVDGVEVHNAKTKPREEQFNSTYRVVSVLTVLHQDWLNGKEYKCKVSNKGLGSSIEKTISKAKGQPREPQVYTLPPSQEEMTKNQVSLTCLVKGFYPSDIAVEWESNGQPENNYKTTPPVLDSDGSFFLYSRLTVDKSRWQEGNVFSCSVMHEALHNHYTQKSLSLSLGKGGGGSGGGGSEVQLVESGGGLVQPGGSLRLSCAASGFTFDDIAMTWVRQAPGKGLEWVSSIYSYGPNTYYADSVKGRFTISTDSAKNTLYLQMNSLKPEDTAVYYCAADSDLSTVVVGPHDYWGQGTQVTVSS

SEQ ID NO: 3962 - protein, 490 aa, synthetic construct
EVQLVESGGGLVQPGGSLRLSCAASGFTFDDIAMTWVRQAPGKGLEWVSSIYSYGPNTYYADSVKGRFTISTDSAKNTLYLQMNSLKPEDTAVYYCAADSDLSTVVVGPHDYWGQGTQVTVSSGGGGSESKYGPPCPPCPAPEFEGGPSVFLFPPKPKDTLMISRTPEVTCVVVDVSQEDPEVQFNWYVDGVEVHNAKTKPREEQFNSTYRVVSVLTVLHQDWLNGKEYKCKVSNKGLGSSIEKTISKAKGQPREPQVYTLPPSQEEMTKNQVSLTCLVKGFYPSDIAVEWESNGQPENNYKTTPPVLDSDGSFFLYSRLTVDKSRWQEGNVFSCSVMHEALHNHYTQKSLSLSLGKGGGGSGGGGSEVQLVESGGGLVQPGGSLRLSCAASGFTFDDIAMTWVRQAPGKGLEWVSSIYSYGPNTYYADSVKGRFTISTDSAKNTLYLQMNSLKPEDTAVYYCAADSDLSTVVVGPHDYWGQGTQVTVSS

SEQ ID NO: 3963 - protein, 512 aa, synthetic construct
APTSSSTKKTQLQLEHLLLDLQMILNGINNYKNPKLTRMLTFKFYMPKKATELKHLQCLEEELKPLEEVLNLAQSKNFHLRPRDLISDINVIVLELKGSETTFMCEYADETATIVEFLNRWITFCQSIISTLTGGGGSGGGGSGGGGSGGGGSDKTHTCPPCPAPEAAGAPSVFLFPPKPKDTLMISRTPEVTCVVVDVSHEDPEVKFNWYVDGVEVHNAKTKPREEQYNSTYRVVSVLTVLHQDWLNGKEYKCKVSNKALPAPIEKTISKAKGQPREPQVYTLPPSREEMTKNQVSLTCLVKGFYPSDIAVEWESNGQPENNYKTTPPVLDSDGSFFLYSKLTVDKSRWQQGNVFSCSVMHEALHNHYTQKSLSLSPGGGGGSGGGGSEVQLVESGGGLVQPGGSLRLSCAASGFTFDDIAMTWVRQAPGKGLEWVSSIYSYGPNTYYADSVKGRFTISTDSAKNTLYLQMNSLKPEDTAVYYCAADSDLSTVVVGPHDYWGQGTQVTVSS

SEQ ID NO: 3964 - protein, 273 aa, synthetic construct
EVQLVESGGGLVQPGGSLRLSCAASGFTFDDIAMTWVRQAPGKGLEWVSSIYSYGPNTYYADSVKGRFTISTDSAKNTLYLQMNSLKPEDTAVYYCAADSDLSTVVVGPHDYWGQGTQVTVSSGGGGSPAPAPAPAPAPAPAPAPGGGGSEVQLVESGGGLVQPGGSLRLSCAASGFTFDDIAMTWVRQAPGKGLEWVSSIYSYGPNTYYADSVKGRFTISTDSAKNTLYLQMNSLKPEDTAVYYCAADSDLSTVVVGPHDYWGQGTQVTVSS

SEQ ID NO: 3965-3968 - skipped (4 entries)

SEQ ID NO: 3969 - protein, 5 aa, synthetic construct
GGGGS

SEQ ID NO: 3970 - protein, 15 aa, synthetic construct
GGGGSGGGGSGGGGS

SEQ ID NO: 3971 - protein, 20 aa, synthetic construct
GGSEGKSSGSGSESKSTGGS

SEQ ID NO: 3972 - protein, 8 aa, synthetic construct
GGGSGGGS

SEQ ID NO: 3973 - protein, 12 aa, synthetic construct
GGGSGGGSGGGS

SEQ ID NO: 3974 - protein, 16 aa, synthetic construct
GGGSGGGSGGGSGGGS

SEQ ID NO: 3975 - protein, 20 aa, synthetic construct
GGGSGGGSGGGSGGGSGGGS

SEQ ID NO: 3976 - protein, 20 aa, synthetic construct
GGGGSGGGGSGGGGSGGGGS

SEQ ID NO: 3977 - protein, 25 aa, synthetic construct
GGGGSGGGGSGGGGSGGGGSGGGGS

SEQ ID NO: 3978 - protein, 14 aa, synthetic construct
IRPRAIGGSKPRVA

SEQ ID NO: 3979 - protein, 15 aa, synthetic construct
GKGGSGKGGSGKGGS

SEQ ID NO: 3980 - protein, 15 aa, synthetic construct
GGKGSGGKGSGGKGS

SEQ ID NO: 3981 - protein, 15 aa, synthetic construct
GGGKSGGGKSGGGKS

SEQ ID NO: 3982 - protein, 15 aa, synthetic construct
GKGKSGKGKSGKGKS

SEQ ID NO: 3983 - protein, 15 aa, synthetic construct
GGGKSGGKGSGKGGS

SEQ ID NO: 3984 - protein, 15 aa, synthetic construct
GKPGSGKPGSGKPGS

SEQ ID NO: 3985 - protein, 20 aa, synthetic construct
GKPGSGKPGSGKPGSGKPGS

SEQ ID NO: 3986 - protein, 20 aa, synthetic construct
GKGKSGKGKSGKGKSGKGKS

SEQ ID NO: 3987 - protein, 14 aa, synthetic construct
STAGDTHLGGEDFD

SEQ ID NO: 3988 - protein, 15 aa, synthetic construct
GEGGSGEGGSGEGGS

SEQ ID NO: 3989 - protein, 15 aa, synthetic construct
GGEGSGGEGSGGEGS

SEQ ID NO: 3990 - protein, 15 aa, synthetic construct
GEGESGEGESGEGES

SEQ ID NO: 3991 - protein, 15 aa, synthetic construct
GGGESGGEGSGEGGS

SEQ ID NO: 3992 - protein, 20 aa, synthetic construct
GEGESGEGESGEGESGEGES

SEQ ID NO: 3993 - protein, 18 aa, synthetic construct
GSTSGSGKPGSGEGSTKG

SEQ ID NO: 3994 - protein, 19 aa, synthetic construct
PRGASKSGSASQTGSAPGS

SEQ ID NO: 3995 - protein, 19 aa, synthetic construct
GTAAAGAGAAGGAAAGAAG

SEQ ID NO: 3996 - protein, 19 aa, synthetic construct
GTSGSSGSGSGGSGSGGGG

SEQ ID NO: 3997 - protein, 4 aa, synthetic construct
GSGS

SEQ ID NO: 3998 - protein, 10 aa, synthetic construct
APAPAPAPAP

SEQ ID NO: 3999 - protein, 20 aa, synthetic construct
APAPAPAPAPAPAPAPAPAP

SEQ ID NO: 4000 - protein, 32 aa, synthetic construct
AEAAAKEAAAKEAAAAKEAAAAKEAAAAKAAA

SEQ ID NO: 4001 - protein, 30 aa, synthetic construct
GGGGSGGGGSGGGGSGGGGSGGGGSGGGGS

SEQ ID NO: 4002 - protein, 35 aa, synthetic construct
GGGGSGGGGSGGGGSGGGGSGGGGSGGGGSGGGGS

SEQ ID NO: 4003 - protein, 15 aa, synthetic construct
EPKSCDKTHTCPPCP

SEQ ID NO: 4004 - protein, 24 aa, synthetic construct
GGGGSGGGSEPKSCDKTHTCPPCP

SEQ ID NO: 4005 - protein, 12 aa, synthetic construct
EPKTPKPQPAAA

SEQ ID NO: 4006 - protein, 62 aa, synthetic construct
ELKTPLGDTTHTCPRCPEPKSCDTPPPCPRCPEPKSCDTPPPCPRCPEPKSCDTPPPCPRCP

SEQ ID NO: 4007 - protein, 12 aa, synthetic construct
ESKYGPPCPSCP

SEQ ID NO: 4008 - protein, 17 aa, synthetic construct
GGGGSESKYGPPCPSCP

SEQ ID NO: 4009 - protein, 17 aa, synthetic construct
PAPAPAPAPAPAPAPAP

SEQ ID NO: 4010 - protein, 22 aa, synthetic construct
GGGGSPAPAPAPAPAPAPAPAP

SEQ ID NO: 4011 - protein, 22 aa, synthetic construct
PAPAPAPAPAPAPAPAPGGGGS

SEQ ID NO: 4012 - protein, 27 aa, synthetic construct
GGGGSPAPAPAPAPAPAPAPAPGGGGS

SEQ ID NO: 4013 - protein, 11 aa, synthetic construct
  VARIANT 1..10: note = This region may encompass 1-10 residues
GGGGGGGGGGS

SEQ ID NO: 4014 - protein, 11 aa, synthetic construct
  VARIANT 2..11: note = This region may encompass 1-10 residues
SGGGGGGGGGG

SEQ ID NO: 4015 - protein, 5 aa, synthetic construct
GGGGS

SEQ ID NO: 4016 - protein, 4 aa, synthetic construct
GGGG

SEQ ID NO: 4017 - protein, 5 aa, synthetic construct
GGGGG

SEQ ID NO: 4018 - protein, 6 aa, synthetic construct
GGGGGG

SEQ ID NO: 4019 - protein, 7 aa, synthetic construct
GGGGGGG

SEQ ID NO: 4020 - protein, 8 aa, synthetic construct
GGGGGGGG

SEQ ID NO: 4021 - protein, 9 aa, synthetic construct
GGGGGGGGG

SEQ ID NO: 4022 - protein, 6 aa, synthetic construct
GGSGGS

SEQ ID NO: 4023 - protein, 9 aa, synthetic construct
GGSGGSGGS

SEQ ID NO: 4024 - protein, 12 aa, synthetic construct
GGSGGSGGSGGS

SEQ ID NO: 4025 - protein, 15 aa, synthetic construct
GGSGGSGGSGGSGGS

SEQ ID NO: 4026 - protein, 10 aa, synthetic construct
GGGGSGGGGS

SEQ ID NO: 4027 - protein, 52 aa, synthetic construct
  VARIANT 2..51: note = This region may encompass 1-10 EAAAK repeating units
AEAAAKEAAAKEAAAKEAAAKEAAAKEAAAKEAAAKEAAAKEAAAKEAAAKA

SEQ ID NO: 4028 - protein, 461 aa, Homo sapiens
MAPVAVWAALAVGLELWAAAHALPAQVAFTPYAPEPGSTCRLREYYDQTAQMCCSKCSPGQHAKVFCTKTSDTVCDSCEDSTYTQLWNWVPECLSCGSRCSSDQVETQACTREQNRICTCRPGWYCALSKQEGCRLCAPLRKCRPGFGVARPGTETSDVVCKPCAPGTFSNTTSSTDICRPHQICNVVAIPGNASMDAVCTSTSPTRSMAPGAVHLPQPVSTRSQHTQPTPEPSTAPSTSFLLPMGPSPPAEGSTGDFALPVGLIVGVTALGLLIIGVVNCVIMTQVKKKPLCLQREAKVPHLPADKARGTQGPEQQHLLITAPSSSSSSLESSASALDRRAPTRNQPQAPGVEASGAGEARASTGSSDSSPGGHGTQVNVTCIVNVCSSSDHSSQCSSQASSTMGDTDSSPSESPKDEQVPFSKEECAFRSQLETPETLLGSTEEKPLPLGVPDAGMKPS

SEQ ID NO: 4029 - protein, 571 aa, Macaca fascicularis
MVTRRGGDDRRRLKGHRVLGVTLEVLARRCWGGRVGGPAEAGEGRGGGVSKAGWPRPAPPRCLASGPLQRGLSLSVAAGWRAQRSLGRRRCAARARGREGRGNRIPPAPMAPAAVWAALAVGLELWAAGHALPAQVAFTPYAPEPGGTCRLREYYDQTAQMCCSKCPPGQHAKVFCTKTSDTVCDSCEDSTYTQLWNWVPECLSCGSRCSSDQVETQACTREQNRICTCRPGWYCALSKQEGCRLCAQLRKCRPGFGVARPGTETSDVVCKPCAPGTFSNTTSSTDICRPHQICHVVAIPGNASMDAVCTSTSPTRSMAPGAVHLPQPVSTRSQHTQPTPAPSTAPGTSFLLPVGPSPPAEGSTGDIVLPVGLIVGVTALGLLIIGVVNCVIMTQVKKKPLCLQRETKVPHLPADKARGAQGPEQQHLLTTVPSSSSSSLESSASALDRRAPTRNQPQAPGAEKASGAGEARASTGSSDSSPGGHGTQVNVTCIVNVCSSSDHSSQCSSQASSTMGDTDASPSGSPKDEQVPFSKEECAFRSQLETPETLLGSTEEKPLPLGVPDAGMKPS

SEQ ID NO: 4030 - protein, 474 aa, Mus musculus
MAPAALWVALVFELQLWATGHTVPAQVVLTPYKPEPGYECQISQEYYDRKAQMCCAKCPPGQYVKHFCNKTSDTVCADCEASMYTQVWNQFRTCLSCSSSCTTDQVEIRACTKQQNRVCACEAGRYCALKTHSGSCRQCMRLSKCGPGFGVASSRAPNGNVLCKACAPGTFSDTTSSTDVCRPHRICSILAIPGNASTDAVCAPESPTLSAIPRTLYVSQPEPTRSQPLDQEPGPSQTPSILTSLGSTPIIEQSTKGGISLPIGLIVGVTSLGLLMLGLVNCIILVQRKKKPSCLQRDAKVPHVPDEKSQDAVGLEQQHLLTTAPSSSSSSLESSASAGDRRAPPGGHPQARVMAEAQGFQEARASSRISDSSHGSHGTHVNVTCIVNVCSSSDHSSQCSSQASATVGDPDAKPSASPKDEQVPFSQEECPSQSPCETTETLQSHEKPLPLGVPDMGMKPSQAGWFDQIAVKVA

SEQ ID NO: 4031 - protein, 5 aa, synthetic construct
VTVSS

SEQ ID NO: 4032 - protein, 5 aa, synthetic construct
VKVSS

SEQ ID NO: 4033 - protein, 5 aa, synthetic construct
VQVSS

SEQ ID NO: 4034 - protein, 5 aa, synthetic construct
VTVKS

SEQ ID NO: 4035 - protein, 5 aa, synthetic construct
VTVQS

SEQ ID NO: 4036 - protein, 5 aa, synthetic construct
VKVKS

SEQ ID NO: 4037 - protein, 5 aa, synthetic construct
VKVQS

SEQ ID NO: 4038 - protein, 5 aa, synthetic construct
VQVKS

SEQ ID NO: 4039 - protein, 5 aa, synthetic construct
VQVQS

SEQ ID NO: 4040 - protein, 6 aa, synthetic construct
VTVSSA

SEQ ID NO: 4041 - protein, 6 aa, synthetic construct
VKVSSA

SEQ ID NO: 4042 - protein, 6 aa, synthetic construct
VQVSSA

SEQ ID NO: 4043 - protein, 12 aa, synthetic construct
GQGTLVTVKPGG

SEQ ID NO: 4044 - protein, 12 aa, synthetic construct
GQGTLVTVEPGG

SEQ ID NO: 4045 - protein, 226 aa, synthetic construct
DKTHTCPPCPAPEAAGGPSVFLFPPKPKDTLMISRTPEVTCVVVDVSHEDPEVKFNWYVDGVEVHNAKTKPREEQYNSTYRVVSVLTVLHQDWLNGKEYKCKVSNKALPAPIEKTISKAKGQPREPQVYTLPPSREEMTKNQVSLTCLVKGFYPSDIAVEWESNGQPENNYKTTPPVLDSDGSFFLYSKLTVDKSRWQQGNVFSCSVMHEALHNHYTQKSLSLSPG

SEQ ID NO: 4046 - protein, 226 aa, synthetic construct
DKTHTCPPCPAPEAAGGPSVFLFPPKPKDTLMISRTPEVTCVVVDVSHEDPEVKFNWYVDGVEVHNAKTKPREEQYNSTYRVVSVLTVLHQDWLNGKEYKCKVSNKALAAPIEKTISKAKGQPREPQVYTLPPSREEMTKNQVSLTCLVKGFYPSDIAVEWESNGQPENNYKTTPPVLDSDGSFFLYSKLTVDKSRWQQGNVFSCSVMHEALHNHYTQKSLSLSPG

SEQ ID NO: 4047 - protein, 226 aa, synthetic construct
DKTHTCPPCPAPELLGGPSVFLFPPKPKDTLMISRTPEVTCVVVAVSHEDPEVKFNWYVDGVEVHNAKTKPREEQYASTYRVVSVLTVLHQDWLNGKEYKCKVSNKALAAPIEKTISKAKGQPREPQVYTLPPSREEMTKNQVSLTCLVKGFYPSDIAVEWESNGQPENNYKTTPPVLDSDGSFFLYSKLTVDKSRWQQGNVFSCSVMHEALHNHYTQKSLSLSPG

SEQ ID NO: 4048 - protein, 226 aa, synthetic construct
DKTHTCPPCPAPEAAGAPSVFLFPPKPKDTLMISRTPEVTCVVVDVSHEDPEVKFNWYVDGVEVHNAKTKPREEQYNSTYRVVSVLTVLHQDWLNGKEYKCKVSNKALPAPIEKTISKAKGQPREPQVYTLPPSREEMTKNQVSLTCLVKGFYPSDIAVEWESNGQPENNYKTTPPVLDSDGSFFLYSKLTVDKSRWQQGNVFSCSVMHEALHNHYTQKSLSLSPG

SEQ ID NO: 4049 - protein, 229 aa, synthetic construct
ESKYGPPCPPCPAPEFEGGPSVFLFPPKPKDTLMISRTPEVTCVVVDVSQEDPEVQFNWYVDGVEVHNAKTKPREEQFNSTYRVVSVLTVLHQDWLNGKEYKCKVSNKGLPSSIEKTISKAKGQPREPQVYTLPPSQEEMTKNQVSLTCLVKGFYPSDIAVEWESNGQPENNYKTTPPVLDSDGSFFLYSRLTVDKSRWQEGNVFSCSVMHEALHNHYTQKSLSLSLGK

SEQ ID NO: 4050 - protein, 229 aa, synthetic construct
ESKYGPPCPPCPAPEFAGGPSVFLFPPKPKDTLMISRTPEVTCVVVDVSQEDPEVQFNWYVDGVEVHNAKTKPREEQFNSTYRVVSVLTVLHQDWLNGKEYKCKVSNKGLPSSIEKTISKAKGQPREPQVYTLPPSQEEMTKNQVSLTCLVKGFYPSDIAVEWESNGQPENNYKTTPPVLDSDGSFFLYSRLTVDKSRWQEGNVFSCSVMHEALHNHYTQKSLSLSLGK

SEQ ID NO: 4051 - protein, 229 aa, synthetic construct
ESKYGPPCPPCPAPEAEGGPSVFLFPPKPKDTLMISRTPEVTCVVVDVSQEDPEVQFNWYVDGVEVHNAKTKPREEQFNSTYRVVSVLTVLHQDWLNGKEYKCKVSNKGLPSSIEKTISKAKGQPREPQVYTLPPSQEEMTKNQVSLTCLVKGFYPSDIAVEWESNGQPENNYKTTPPVLDSDGSFFLYSRLTVDKSRWQEGNVFSCSVMHEALHNHYTQKSLSLSLGK

SEQ ID NO: 4052 - protein, 229 aa, synthetic construct
ESKYGPPCPPCPAPEAAGGPSVFLFPPKPKDTLMISRTPEVTCVVVDVSQEDPEVQFNWYVDGVEVHNAKTKPREEQFNSTYRVVSVLTVLHQDWLNGKEYKCKVSNKGLPSSIEKTISKAKGQPREPQVYTLPPSQEEMTKNQVSLTCLVKGFYPSDIAVEWESNGQPENNYKTTPPVLDSDGSFFLYSRLTVDKSRWQEGNVFSCSVMHEALHNHYTQKSLSLSLGK

SEQ ID NO: 4053 - protein, 229 aa, synthetic construct
ESKYGPPCPPCPAPEFEGGPSVFLFPPKPKDTLMISRTPEVTCVVVDVSQEDPEVQFNWYVDGVEVHNAKTKPREEQFNSTYRVVSVLTVLHQDWLNGKEYKCKVSNKGLGSSIEKTISKAKGQPREPQVYTLPPSQEEMTKNQVSLTCLVKGFYPSDIAVEWESNGQPENNYKTTPPVLDSDGSFFLYSRLTVDKSRWQEGNVFSCSVMHEALHNHYTQKSLSLSLGK

SEQ ID NO: 4054 - protein, 226 aa, synthetic construct
DKTHTCPPCPAPEGSRGPSVFLFPPKPKDTLMISRTPEVTCVVVDVSHEDPEVKFNWYVDGVEVHNAKTKPREEQYNSTYRVVSVLTVLHQDWLNGKEYKCKVSNKALPAPIEKTISKAKGQPREPQVYTLPPSREEMTKNQVSLTCLVKGFYPSDIAVEWESNGQPENNYKTTPPVLDSDGSFFLYSKLTVDKSRWQQGNVFSCSVMHEALHNHYTQKSLSLSPG

SEQ ID NO: 4055 - protein, 226 aa, synthetic construct
DKTHTCPPCPAPESTRGPSVFLFPPKPKDTLMISRTPEVTCVVVDVSHEDPEVKFNWYVDGVEVHNAKTKPREEQYNSTYRVVSVLTVLHQDWLNGKEYKCKVSNKALPAPIEKTISKAKGQPREPQVYTLPPSREEMTKNQVSLTCLVKGFYPSDIAVEWESNGQPENNYKTTPPVLDSDGSFFLYSKLTVDKSRWQQGNVFSCSVMHEALHNHYTQKSLSLSPG

SEQ ID NO: 4056 - protein, 226 aa, synthetic construct
DKTHTCPPCPAPESVRGPSVFLFPPKPKDTLMISRTPEVTCVVVDVSHEDPEVKFNWYVDGVEVHNAKTKPREEQYNSTYRVVSVLTVLHQDWLNGKEYKCKVSNKALPAPIEKTISKAKGQPREPQVYTLPPSREEMTKNQVSLTCLVKGFYPSDIAVEWESNGQPENNYKTTPPVLDSDGSFFLYSKLTVDKSRWQQGNVFSCSVMHEALHNHYTQKSLSLSPG

SEQ ID NO: 4057 - protein, 226 aa, synthetic construct
DKTHTCPPCPAPETQRGPSVFLFPPKPKDTLMISRTPEVTCVVVDVSHEDPEVKFNWYVDGVEVHNAKTKPREEQYNSTYRVVSVLTVLHQDWLNGKEYKCKVSNKALPAPIEKTISKAKGQPREPQVYTLPPSREEMTKNQVSLTCLVKGFYPSDIAVEWESNGQPENNYKTTPPVLDSDGSFFLYSKLTVDKSRWQQGNVFSCSVMHEALHNHYTQKSLSLSPG

SEQ ID NO: 4058 - protein, 226 aa, synthetic construct
DKTHTCPPCPAPETTRGPSVFLFPPKPKDTLMISRTPEVTCVVVDVSHEDPEVKFNWYVDGVEVHNAKTKPREEQYNSTYRVVSVLTVLHQDWLNGKEYKCKVSNKALPAPIEKTISKAKGQPREPQVYTLPPSREEMTKNQVSLTCLVKGFYPSDIAVEWESNGQPENNYKTTPPVLDSDGSFFLYSKLTVDKSRWQQGNVFSCSVMHEALHNHYTQKSLSLSPG

SEQ ID NO: 4059 - protein, 226 aa, synthetic construct
DKTHTCPPCPAPEAAGGPSVFLFPPKPKDTLMISRTPEVTCVVVDVSHEDPEVKFNWYVDGVEVHNAKTKPREEQYNSTYRVVSVLTVLHQDWLNGKEYKCKVSNKALGAPIEKTISKAKGQPREPQVYTLPPSREEMTKNQVSLTCLVKGFYPSDIAVEWESNGQPENNYKTTPPVLDSDGSFFLYSKLTVDKSRWQQGNVFSCSVMHEALHNHYTQKSLSLSPG

SEQ ID NO: 4060 - protein, 226 aa, synthetic construct
DKTHTCPPCPAPELLGGPSVFLFPPKPKDTLYITREPEVTCVVVDVSHEDPEVKFNWYVDGVEVHNAKTKPREEQYNSTYRVVSVLTVLHQDWLNGKEYKCKVSNKALPAPIEKTISKAKGQPREPQVYTLPPSREEMTKNQVSLTCLVKGFYPSDIAVEWESNGQPENNYKTTPPVLDSDGSFFLYSKLTVDKSRWQQGNVFSCSVMHEALHNHYTQKSLSLSPG

SEQ ID NO: 4061 - protein, 8 aa, synthetic construct
GFTLDDYA

SEQ ID NO: 4062 - protein, 8 aa, synthetic construct
IFSYSSNT

SEQ ID NO: 4063 - protein, 15 aa, synthetic construct
AVGDFEGELVLKGDY

SEQ ID NO: 4064 - protein, 122 aa, synthetic construct
EVQLVESGGGLVQPGGSLRLSCAASGFTLDDYAMSWVRQAPGKGLEWVSTIFSYSSNTYYADSVKGRFTISTDNAKNTLYLQMNSLKPEDTAVYYCAVGDFEGELVLKGDYWGQGTQVTVSS

SEQ ID NO: 4065 - protein, 8 aa, synthetic construct
GFTLDYYT

SEQ ID NO: 4066 - protein, 8 aa, synthetic construct
ISSNDGSV

SEQ ID NO: 4067 - protein, 21 aa, synthetic construct
AADLGYLYVDYVRLHTHHFGS

SEQ ID NO: 4068 - protein, 128 aa, synthetic construct
EVQLVESGGGLVQSGGSLRLSCAASGFTLDYYTIGWFRQAPGKEREGVSYISSNDGSVYYADSVKGRFTIEKDSAKNTVYLQMNSLKPEDTAVYYCAADLGYLYVDYVRLHTHHFGSWGQGTQVTVSS

SEQ ID NO: 4069 - protein, 8 aa, synthetic construct
GRTFGSYT

SEQ ID NO: 4070 - protein, 8 aa, synthetic construct
IRWTGGST

SEQ ID NO: 4071 - protein, 11 aa, synthetic construct
VASPTGRAFTY

SEQ ID NO: 4072 - protein, 118 aa, synthetic construct
EVQLVESGGGLVEAGGSLRLSCAASGRTFGSYTMGWFRQAPGREREFLASIRWTGGSTSYADSVKGRFTISRDDAKKAVYLQMNSLKPEDTAVYYCVASPTGRAFTYWGQGTQVTVSS

SEQ ID NO: 4073 - DNA, 366 bp, synthetic construct
  source 1..366: mol_type = other DNA
gaggtgcagcttgtagagagtggcggtggactggtccagccgggtggatcgttgcgtctctcatgtgctgcgtctggttttacgctggatgattatgccatgtcatgggtgcgccaagctcctggtaaaggcttggaatgggtgagcactatttttagctattccagtaatacctattacgcggactctgttaaggggcggtttacaatctccactgataacgccaaaaataccttatacctgcagatgaactcgcttaaaccagaagataccgcagtttactattgcgcagttggggacttcgaaggtgaactggtcttaaaaggcgattattggggacagggcacacaagtaacggttagtagc

SEQ ID NO: 4074 - DNA, 384 bp, synthetic construct
  source 1..384: mol_type = other DNA
gaggtgcagctggtggagtctgggggaggtttggtgcagtctggggggtctctgagactctcctgtgcagcctctggattcactttggattattataccataggctggttccgccaggccccagggaaggagcgtgagggggtctcatatattagtagtaacgatggtagtgtgtactatgcagactccgtgaagggccgattcaccatcgagaaagacagtgccaagaacacggtgtatctgcaaatgaacagcctgaaacctgaggacacagccgtctattactgtgcagcagatctcggttatctgtacgtcgactatgtccgtcttcacacgcatcactttggttcctggggccaggggacccaggtcaccgtctcctca

SEQ ID NO: 4075 - DNA, 354 bp, synthetic construct
  source 1..354: mol_type = other DNA
gaggtacagctggtggagagtgggggcggcttagttgaagcgggcggtagtctgcgactctcttgcgccgcatccgggcggacttttggtagctatacgatgggctggttccgccaagcccctggacgtgaacgggaatttttggcatcgattcgctggacaggtggtagcacatcttacgctgactcagtcaaaggaagattcacaatctcacgtgatgatgcgaaaaaggctgtatatcttcagatgaatagcctgaaaccagaagatactgcagtctactattgtgttgcgtcgccgacggggcgtgcctttacctattggggccaaggtacccaggtgaccgtttcctct

SEQ ID NO: 4076 - protein, 122 aa, synthetic construct
EVQLLESGGGLVQPGGSLRLSCAASGFTLDDYAMSWVRQAPGKGLEWVSTIFSYSSNTYYADSVKGRFTISTDNAKNTLYLQMNSLRPEDTAVYYCAVGDFEGELVLKGDYWGQGTQVTVSS

SEQ ID NO: 4077 - protein, 128 aa, synthetic construct
EVQLLESGGGLVQPGGSLRLSCAASGFTLDYYTIGWFRQAPGKEREGVSYISSNDGSVYYADSVKGRFTISKDSAKNTVYLQMNSLRPEDTAVYYCAADLGYLYVDYVRLHTHHFGSWGQGTQVTVSS

SEQ ID NO: 4078 - protein, 118 aa, synthetic construct
EVQLLESGGGLVQPGGSLRLSCAASGRTFGSYTMGWFRQAPGKEREFLASIRWTGGSTSYADSVKGRFTISRDDAKKTVYLQMNSLRPEDTAVYYCVASPTGRAFTYWGQGTQVTVSS

SEQ ID NO: 4079 - protein, 122 aa, synthetic construct; identical to SEQ ID NO: 4064

SEQ ID NO: 4080 - protein, 122 aa, synthetic construct
EVQLVESGGGLVQPGGSLRLSCAASGFTLDDYAMSWVRQAPGKGLEWVSSIFSYSTNTYYADSVKGRFTISTDNAKNTLYLQMNSLKPEDTAVYYCAVGDFEGELVLKGDYWGQGTQVTVSS

SEQ ID NO: 4081 - protein, 122 aa, synthetic construct
EVQLVESGGGLVQPGGSLRLSCAASGFTLDDYAMSWVRQAPGKGLEWVSTIFSYSSNTYYADSVKGRFTISTDTAKNTLYLQMNSLKPEDTAVYYCAVGDFEGELVLKGDYWGQGTQVTVSS

SEQ ID NO: 4082 - protein, 122 aa, synthetic construct
EVQLVESGGGLVQPGGSLRLSCAASGFTLDDYAMSWVRQAPGKGLEWVSTIFSYSSNTHYADSVKGRFTISTDNAKNTLYLQMNSLKPEDTAVYYCAVGDFEGELVLKGDYWGQGTQVTVSS

SEQ ID NO: 4083 - protein, 122 aa, synthetic construct
EVQLVESGGGLVQPGGSLRLSCAASGFTLDDYAMSWVRQAPGKGLEWVSTIFSYSSNTYYADSVKGRFTISTDNAKNTLYLQMNSLKPEDTAVYYCAVGDLEGELVLKGDYWGQGTQVTVSS

SEQ ID NO: 4084 - protein, 122 aa, synthetic construct
EVQLVESGGGLVQPGGSLRLSCAASGFTLDDYAMSWVRQAPGKGLEWVSTIFSYSSNTYYADSVKGRFTISTDNAKNTLYLQMNSLKPEDTAVYYCAVGDFEGELVLEGDYWGQGTQVTVSS

SEQ ID NO: 4085 - protein, 122 aa, synthetic construct
EVQLVESGGGLVQPGGSLRLSCAASGFTFDDIAMTWVRQAPGKGLEWVSSIYSYGPNTYYADSVKGRFTISTDSAKNTLYLQMNSLKPEDTAVYYCAVGDFEGELVLKGDYWGQGTQVTVSS

SEQ ID NO: 4086 - protein, 122 aa, synthetic construct
EVQLVESGGGLVQPGGSLRLSCAASGFTLDDYAMSWVRQAPGKGLEWVSTIFSYSSNTYYADSVKGRFTISTDNAKNTLYLQMNGLKPEDTAVYYCAVGDFEGELVLKGDYWGQGTRVTVSS

SEQ ID NO: 4087 - protein, 122 aa, synthetic construct
EVQLVESGGGLVQPGGSLRLSCAASGFTLDDYAMSWVRQAPGEGLEWVSTIFSYSSNTYYADSVKGRFTISTDNAKNTLYLQMNSLKPEDTAVYYCAVGDFEGELVLKGDYWGQGTQVTVSS

SEQ ID NO: 4088 - protein, 128 aa, synthetic construct
EVQLVESGGGLVQPGGSLRLSCAASGFTLDYYTIGWFRQAPGKEREGVSYISSNDGSVYYADSVKGRFTIEKDSAKNTVYLQMNSLKPEDTAVYYCAADLGFLYVDYVRLHTHHFGSWGQGTQVTVSS

SEQ ID NO: 4089 - protein, 128 aa, synthetic construct; identical to SEQ ID NO: 4068

SEQ ID NO: 4090 - protein, 128 aa, synthetic construct
EVQLVESGGGLVQPGGSLRLACAASGVSLDYHTIGWFRQAPGKEREGVSYISSHDGSIYYADFVKGRFTIDKDNAKNTVYLQMNSLKPEDTAVYYCAADVGVLYADYVRLHMHHFGSWGQGTQVTVSS

SEQ ID NO: 4091 - protein, 128 aa, synthetic construct
EVQLVESGGGLVQPGGSLRLSCAASGVSLDYHTIGWFRQAPGKEREGVSYINSNDGTTYYADFVKGRFTIDKDNAKNTVYLQMNDLKPEDTAVYYCAADLGVLYTDYVRLHMHHFGSWGQGTQVTVSS

SEQ ID NO: 4092 - protein, 128 aa, synthetic construct
EVQLVESGGGLVQPGGSLRLSCAASGFTLDDYTIGWFRQAPGKEREGVSYIDRFDGSVYYADSVKGRFTIEKDSAKNTVYLQMNSLKPEDTAVYYCAADLGFLYVDYVRLHTHHFGSWGQGTQVTVSS

SEQ ID NO: 4093 - protein, 128 aa, synthetic construct
EVQLVESGGGLVQPGGSLRLSCAASGVSLDYHTIGWFRQAPGKEREGVSYISSNDGSTYYADFVKGRFTIDKDNAKNTVYLQMNSLKPEDTAVYYCAADVGVLYADYVRLHTHHFGSWGQGTQVTVSS

SEQ ID NO: 4094 - protein, 128 aa, synthetic construct
EVQLVESGGGLVQPGGSLRLSCAASGVSLDYHTIGWFRQAPGKEREGVSYISSNDGSTYYADFVKGRFTIDKDNAKNTVYLQMNSLEPEDTAVYYCAADVGVLYADYVRLHTHHFGSWGQGTQVTVSS

SEQ ID NO: 4095 - protein, 128 aa, synthetic construct
EVQLVESGGGLVQPGGSLRLSCAASGVSLDYHTIGWFRQAPGKEREGVSYISSIDGSTYYADFVKGRFTIDKDNAKNTVYLQMNSLKPEDTAVYYCAADVGVLYADYVRLHMHHFGSWGRGTQVTVSS

SEQ ID NO: 4096 - protein, 128 aa, synthetic construct
EVQLVESGGGLVQAGGSLRLSCAASGVSLDYHTIGWFRQAPGKEREGVSYINSNDGTTYYADFVKGRFTIDKDNAKNTVYLQMNDLKPEDTAVYYCAADLGVLYTDYVRLHMHHFGSWGQGTQVTVSS

SEQ ID NO: 4097 - protein, 128 aa, synthetic construct
EVQLVESGGGLVQPGESLRLSCAASGVSLDYHTIGWFRQAPGKEREGVSYINSNDGTTYYADFVKGRFTIDKDNAKNTVYLQMNDLKPEDTAVYYCAADLGVLYTDYVRLHMHHFGSWGQGTQVTVSS

SEQ ID NO: 4098 - protein, 128 aa, synthetic construct
EVQLVESGGGLVQPGGSLRLSCAASGFTLGDYTIGWFRQAPGKEREGVSYISHDDGSTYYADFVKGRFSIDKDNAKNTVHLYMNSLKPDDTAVYYCAADLGFLYADYVRLYTHHFGSWGQGTQVTVSS

SEQ ID NO: 4099 - protein, 128 aa, synthetic construct
EVQLVESGGGLVQPGGSLRLSCAASGVSLDYHTIGWFRQAPGKEREGVSYISSNDGSTYYADFVKGRFTIDKDNAKNTVYLQMNSLKPEDTAVYYCAADVGVLYADYVPLHMHHFGSWGQGTQVTVSS

SEQ ID NO: 4100 - protein, 128 aa, synthetic construct
EVQLVESGGDLVQPGGSLRLSCLASGFSFDHYAIGWFRQTPGKEREGVSYISNNDGSVYYADSVKGRFTIEKDSAKNTVYLQMNNLKPEDTAVYYCAADLGFLYVDYVPLHTHHFGSWGQGTQVTVSS

SEQ ID NO: 4101 - protein, 118 aa, synthetic construct; identical to SEQ ID NO: 4072

SEQ ID NO: 4102 - protein, 118 aa, synthetic construct
EVQLVESGGGLVETGGSLRLSCAASGRTFGNYTMGWFRQAPGREREFLASIRWTGGSTSYADSVKGRFTISRDNAKKAVYLQMNSLKPEDTAVYSCVAAPPGRAFTYWGQGTQVTVSS

SEQ ID NO: 4103 - protein, 118 aa, synthetic construct
EVQLVESGGGLVETGGSLRLSCAASGRTFGNYTMGWFRQAPGREREFLASIRWTGGSTSYADSVKGRFTISRDNAKKAVYLQMNSLKPEDTAVYSCVAAPTGREFTYWGQGTQVTVSS

SEQ ID NO: 4104 - protein, 118 aa, synthetic construct
EVQLVESGGGLVETGGSLRLSCAASGRTFGNYTMGWFRQAPGREREFLASIRWTGGSTSYADSVKGRFTISRDNAKKAVYLQMNSLKPEDTAVYSCVAAPTGSAFTYWGQGTQVTVSS

SEQ ID NO: 4105 - protein, 118 aa, synthetic construct
EVQLVESGGGLVETGGSLRLSCAASGRTFGNYTMGWFRQAPGREREFLASIRWTGGSTSYADSVKGRFTISRDNAKKAVYLQMNSLKPEDTAVYSCVAAPTVRAFTYWGQGTQVTVSS

SEQ ID NO: 4106 - protein, 118 aa, synthetic construct
EVQLVESGGGLVETGGSLRLSCAASGRTFGNYTMGWFRQAPGREREFLASIRWTGGSTSYADSVKGRFTISRDNAKKAVYLQMNSLKPEDTAVYSCVAATTGRAFTYWGQGTQVTVSS

SEQ ID NO: 4107 - protein, 118 aa, synthetic construct
EVQLVESGGGLVETGGSLRLSCAASGRTFGNYTMGWFRQAPGREREFLASIRWTGGSTSYADSVKGRFTISRDNAKKAVYLQMNSLKPEDTAVYSCVAAPTGRAFTYWGQGTQVTVSS

SEQ ID NO: 4108 - protein, 118 aa, synthetic construct
EVQLVESGGGLVETGGSLRLSCAASGRTFGNYTMGWFRQAPGREREFLASIRWTGGSTSYADSVKGRFTISRDNAKKAVYLQMNSLKPEDTAVYSCVAAPSGRAFTYWGQGTQVTVSS

SEQ ID NO: 4109 - protein, 118 aa, synthetic construct
EVQLVESGGGLVETGGSLRLSCAASGRTFGNYTMGWFRQAPGREREFLASIRWTGGSTSYADSVKGRFTISRDNAKKAVYLQMNSLKPEDTAVYSCVAAPTGRALTYWGQGTQVTVSS

SEQ ID NO: 4110 - protein, 118 aa, synthetic construct
EVQLVESGGGLVETGGSLRLSCAASGRTFGNYTMGWFRQAPGREREFLASIRWTGGSTSYADSVKGRFTISRDNAKKAVYLQMNSLKPEDTAVYSCVAAPTGRAYTYWGQGTQVTVSS

SEQ ID NO: 4111 - protein, 118 aa, synthetic construct
EVQLVESGGGLVETGGSLRLSCAASGRTFGNYTMGWFRQAPGREREFLASIRWTGGSTSYADSVKGRFTISRDNAKKAVYLQMNSLKPEDTAVYSCVATPTGRAFTYWGQGTQVTVSS

SEQ ID NO: 4112 - protein, 118 aa, synthetic construct
EVQLVESGGGLVETGGSLRLSCAASGRTFGNYTMGWFRQAPGREREFLASIRWTGGSTSYADSVKGRFTISRDNAKKAVYLQMNSLKPEDTAVYSCVAAPTGKAFTYWGQGTQVTVSS

SEQ ID NO: 4113 - protein, 118 aa, synthetic construct
EVQLVESGGGLVETGGSLRLSCAASGRTFGNYTMGWFRQAPGREREFLASIRWTGGSTSYADSVKGRFTISRDNAKKAVYLQLNSLKPEDTAVYSCVAAPPGRAFTYWGQGTQVTVSS

SEQ ID NO: 4114 - protein, 118 aa, synthetic construct
EVQLVESGGGLVETGGSLRLSCAASGHTFGNYTMGWFRQAPGREREFLASIRWTGGSTSYADSVKGRFTISRDNAKKAVYLQMNSLKPEDTAVYSCVAAPSGRAFTYWGQGTQVTVSS

SEQ ID NO: 4115 - protein, 118 aa, synthetic construct
EVQLVESGGGLVETGGSLRLSCAASGRTFGNYTMGWFRQAPGREREFLASIRWTGGSTSYADSVKGRFTISRDNAKKAVYLQMNSLKPEDTAVYSCVAAPAGRAFTYWGQGTQVTVSS

SEQ ID NO: 4116 - protein, 118 aa, synthetic construct
EVQLVESGGGLVETGGSLRLSCAASGRTFGNYTMGWFRQAPGREREFLASIRWTGGSTSYADSMKGRFTISRDNAKKAVYLQMNSLKPEDTAVYSCVAAPAGRAFTYWGQGTQVTVSS

SEQ ID NO: 4117 - protein, 118 aa, synthetic construct
EVQLVESGGGLVETGGSLRLSCAASGRTFGNYTMGWFRQAPGREREFLASIRWTGGSTSYADSVKGRFTISRDNAKKAVYLQMNSLKPEDTAVYSCVAALTGRAFTYWGQGTQVTVSS

SEQ ID NO: 4118 - protein, 118 aa, synthetic construct
EVQLVESGGGLVETGGSLRLSCAASGRTFGNYTMGWFRQAPGREREFLASIRWTGGSTSYADSVKGRFTISRDNAKKAVYLQMNSLKPEDTAVYSCVAAHTGRAFTYWGQGTQVTVSS

SEQ ID NO: 4119 - protein, 118 aa, synthetic construct
EVQLVESGGGLVETGGSLRLSCAASERTFESDTMGWFRQAPGREREFLASIRWPGGSTSYANSVKGRFTISRDNAKKAVYLQMNSLKPEDTAVYSCAAAPAGRAFTYEGQGTQVTVSS

SEQ ID NO: 4120 - protein, 118 aa, synthetic construct
EVQLVESGGGLVETGGSLRLSCAASGRTFGNHTMGWFRQAPGREREFLASIRWTGGSTSYADSVKGRFTISRDNAKKAVYLQMNSLKPEDTAVYSCVAASTGRAFTYWGQGTQVTVSS

SEQ ID NO: 4121 - protein, 118 aa, synthetic construct
EVQLVESGGGLVETGGSLRLSCAASGRTFGNYTMGWFRQAPGREREFLASIRWTGGSTSYADSVKGRFTISRDNAKKAVYLRMNSLKPEDTAVYSCVAAPAGRAFTYWGQGTQVTVSS

SEQ ID NO: 4122 - protein, 118 aa, synthetic construct
EVQLVESGGGLVETGGSLRLSCAASGRTFGNYTMGWFRQAPGREREFLASIRWTGGSTSYADSVKGRFTISRDNAKKAVYLQMNSLKPEDTAVYSCVAAPTWRAFTYWGQGTQVTVSS

SEQ ID NO: 4123 - protein, 118 aa, synthetic construct
EVQLVESGGGLVETGGSLRLSCAASGRTFGNYTMGWFRQAPGREREFLASIRWTGGSTSYADSVKGRFTISRDNAKKAVYLQLNSLKPEDTAVYSCVAAPTVRAFTYWGQGTQVTVSS

SEQ ID NO: 4124 - protein, 118 aa, synthetic construct
EVQLVESGGGLVETGGSLRLSCAASGRTFGNYTMGWFRQAPGREREFLASIRWTGGSTSYADSVKGRFTISRDNAKKAVYLQMDSLKPEDTAVYSCVAASTGRAFTYWGQGTQVTVSS

SEQ ID NO: 4125 - protein, 118 aa, synthetic construct
EVQLVESGGGLVETGGSLRLSCAASGRTFGNYTMGWFRQAPGREREFLASIRWTGGSTSYADSVKGRFTISRDNAKKAVYLQMNSLKPEDTAVYSCVAAPIGRAFTYWGQGTQVTVSS

SEQ ID NO: 4126 - protein, 122 aa, synthetic construct; identical to SEQ ID NO: 4076

SEQ ID NO: 4127 - protein, 122 aa, synthetic construct
EVQLLESGGGLVQPGGSLRLSCAASGFTLDDYAMSWVRQAPGKGLEWVSSIFSYSTNTYYADSVKGRFTISTDNAKNTLYLQMNSLRPEDTAVYYCAVGDFEGELVLKGDYWGQGTQVTVSS

SEQ ID NO: 4128 - protein, 122 aa, synthetic construct
EVQLLESGGGLVQPGGSLRLSCAASGFTLDDYAMSWVRQAPGKGLEWVSTIFSYSSNTYYADSVKGRFTISTDTAKNTLYLQMNSLRPEDTAVYYCAVGDFEGELVLKGDYWGQGTQVTVSS

SEQ ID NO: 4129 - protein, 122 aa, synthetic construct
EVQLLESGGGLVQPGGSLRLSCAASGFTLDDYAMSWVRQAPGKGLEWVSTIFSYSSNTHYADSVKGRFTISTDNAKNTLYLQMNSLRPEDTAVYYCAVGDFEGELVLKGDYWGQGTQVTVSS

SEQ ID NO: 4130 - protein, 122 aa, synthetic construct
EVQLLESGGGLVQPGGSLRLSCAASGFTLDDYAMSWVRQAPGKGLEWVSTIFSYSSNTYYADSVKGRFTISTDNAKNTLYLQMNSLRPEDTAVYYCAVGDLEGELVLKGDYWGQGTQVTVSS

SEQ ID NO: 4131 - protein, 122 aa, synthetic construct
EVQLLESGGGLVQPGGSLRLSCAASGFTLDDYAMSWVRQAPGKGLEWVSTIFSYSSNTYYADSVKGRFTISTDNAKNTLYLQMNSLRPEDTAVYYCAVGDFEGELVLEGDYWGQGTQVTVSS

SEQ ID NO: 4132 - protein, 122 aa, synthetic construct
EVQLLESGGGLVQPGGSLRLSCAASGFTFDDIAMTWVRQAPGKGLEWVSSIYSYGPNTYYADSVKGRFTISTDSAKNTLYLQMNSLRPEDTAVYYCAVGDFEGELVLKGDYWGQGTQVTVSS

SEQ ID NO: 4133 - protein, 122 aa, synthetic construct
EVQLLESGGGLVQPGGSLRLSCAASGFTLDDYAMSWVRQAPGKGLEWVSTIFSYSSNTYYADSVKGRFTISTDNAKNTLYLQMNSLRPEDTAVYYCAVGDFEGELVLKGDYWGQGTRVTVSS

SEQ ID NO: 4134 - protein, 122 aa, synthetic construct; identical to SEQ ID NO: 4076

SEQ ID NO: 4135 - protein, 128 aa, synthetic construct
EVQLLESGGGLVQPGGSLRLSCAASGFTLDYYTIGWFRQAPGKEREGVSYISSNDGSVYYADSVKGRFTISKDSAKNTVYLQMNSLRPEDTAVYYCAADLGFLYVDYVRLHTHHFGSWGQGTQVTVSS

SEQ ID NO: 4136 - protein, 128 aa, synthetic construct; identical to SEQ ID NO: 4077

SEQ ID NO: 4137 - protein, 128 aa, synthetic construct
EVQLLESGGGLVQPGGSLRLSCAASGVSLDYHTIGWFRQAPGKEREGVSYISSHDGSIYYADSVKGRFTISKDNAKNTVYLQMNSLRPEDTAVYYCAADVGVLYADYVRLHMHHFGSWGQGTQVTVSS

SEQ ID NO: 4138 - protein, 128 aa, synthetic construct
EVQLLESGGGLVQPGGSLRLSCAASGVSLDYHTIGWFRQAPGKEREGVSYINSNDGTTYYADSVKGRFTISKDNAKNTVYLQMNSLRPEDTAVYYCAADLGVLYTDYVRLHMHHFGSWGQGTQVTVSS

SEQ ID NO: 4139 - protein, 128 aa, synthetic construct
EVQLLESGGGLVQPGGSLRLSCAASGFTLDDYTIGWFRQAPGKEREGVSYIDRFDGSVYYADSVKGRFTISKDSAKNTVYLQMNSLRPEDTAVYYCAADLGFLYVDYVRLHTHHFGSWGQGTQVTVSS

SEQ ID NO: 4140 - protein, 128 aa, synthetic construct
EVQLLESGGGLVQPGGSLRLSCAASGVSLDYHTIGWFRQAPGKEREGVSYISSNDGSTYYADSVKGRFTISKDNAKNTVYLQMNSLRPEDTAVYYCAADVGVLYADYVRLHTHHFGSWGQGTQVTVSS

SEQ ID NO: 4141 - protein, 128 aa, synthetic construct; identical to SEQ ID NO: 4140

SEQ ID NO: 4142 - protein, 128 aa, synthetic construct
EVQLLESGGGLVQPGGSLRLSCAASGVSLDYHTIGWFRQAPGKEREGVSYISSIDGSTYYADSVKGRFTISKDNAKNTVYLQMNSLRPEDTAVYYCAADVGVLYADYVRLHMHHFGSWGQGTQVTVSS

SEQ ID NO: 4143 - protein, 128 aa, synthetic construct; identical to SEQ ID NO: 4138

SEQ ID NO: 4144 - protein, 128 aa, synthetic construct; identical to SEQ ID NO: 4138

SEQ ID NO: 4145 - protein, 128 aa, synthetic construct
EVQLLESGGGLVQPGGSLRLSCAASGFTLGDYTIGWFRQAPGKEREGVSYISHDDGSTYYADSVKGRFTISKDNAKNTVYLQMNSLRPEDTAVYYCAADLGFLYADYVRLYTHHFGSWGQGTQVTVSS

SEQ ID NO: 4146 - protein, 128 aa, synthetic construct
EVQLLESGGGLVQPGGSLRLSCAASGVSLDYHTIGWFRQAPGKEREGVSYISSNDGSTYYADSVKGRFTISKDNAKNTVYLQMNSLRPEDTAVYYCAADVGVLYADYVPLHMHHFGSWGQGTQVTVSS

SEQ ID NO: 4147 - protein, 128 aa, synthetic construct
EVQLLESGGGLVQPGGSLRLSCAASGFSFDHYAIGWFRQAPGKEREGVSYISNNDGSVYYADSVKGRFTISKDSAKNTVYLQMNSLRPEDTAVYYCAADLGFLYVDYVPLHTHHFGSWGQGTQVTVSS

SEQ ID NO: 4148 - protein, 118 aa, synthetic construct; identical to SEQ ID NO: 4078

SEQ ID NO: 4149 - protein, 118 aa, synthetic construct
EVQLLESGGGLVQPGGSLRLSCAASGRTFGNYTMGWFRQAPGKEREFLASIRWTGGSTSYADSVKGRFTISRDNAKKTVYLQMNSLRPEDTAVYYCVAAPPGRAFTYWGQGTQVTVSS

SEQ ID NO: 4150 - protein, 118 aa, synthetic construct
EVQLLESGGGLVQPGGSLRLSCAASGRTFGNYTMGWFRQAPGKEREFLASIRWTGGSTSYADSVKGRFTISRDNAKKTVYLQMNSLRPEDTAVYYCVAAPTGREFTYWGQGTQVTVSS

SEQ ID NO: 4151 - protein, 118 aa, synthetic construct
EVQLLESGGGLVQPGGSLRLSCAASGRTFGNYTMGWFRQAPGKEREFLASIRWTGGSTSYADSVKGRFTISRDNAKKTVYLQMNSLRPEDTAVYYCVAAPTGSAFTYWGQGTQVTVSS

SEQ ID NO: 4152 - protein, 118 aa, synthetic construct
EVQLLESGGGLVQPGGSLRLSCAASGRTFGNYTMGWFRQAPGKEREFLASIRWTGGSTSYADSVKGRFTISRDNAKKTVYLQMNSLRPEDTAVYYCVAAPTVRAFTYWGQGTQVTVSS

SEQ ID NO: 4153 - protein, 118 aa, synthetic construct
EVQLLESGGGLVQPGGSLRLSCAASGRTFGNYTMGWFRQAPGKEREFLASIRWTGGSTSYADSVKGRFTISRDNAKKTVYLQMNSLRPEDTAVYYCVAATTGRAFTYWGQGTQVTVSS

SEQ ID NO: 4154 - protein, 118 aa, synthetic construct
EVQLLESGGGLVQPGGSLRLSCAASGRTFGNYTMGWFRQAPGKEREFLASIRWTGGSTSYADSVKGRFTISRDNAKKTVYLQMNSLRPEDTAVYYCVAAPTGRAFTYWGQGTQVTVSS

SEQ ID NO: 4155 - protein, 118 aa, synthetic construct
EVQLLESGGGLVQPGGSLRLSCAASGRTFGNYTMGWFRQAPGKEREFLASIRWTGGSTSYADSVKGRFTISRDNAKKTVYLQMNSLRPEDTAVYYCVAAPSGRAFTYWGQGTQVTVSS

SEQ ID NO: 4156 - protein, 118 aa, synthetic construct
EVQLLESGGGLVQPGGSLRLSCAASGRTFGNYTMGWFRQAPGKEREFLASIRWTGGSTSYADSVKGRFTISRDNAKKTVYLQMNSLRPEDTAVYYCVAAPTGRALTYWGQGTQVTVSS

SEQ ID NO: 4157 - protein, 118 aa, synthetic construct
EVQLLESGGGLVQPGGSLRLSCAASGRTFGNYTMGWFRQAPGKEREFLASIRWTGGSTSYADSVKGRFTISRDNAKKTVYLQMNSLRPEDTAVYYCVAAPTGRAYTYWGQGTQVTVSS

SEQ ID NO: 4158 - protein, 118 aa, synthetic construct
EVQLLESGGGLVQPGGSLRLSCAASGRTFGNYTMGWFRQAPGKEREFLASIRWTGGSTSYADSVKGRFTISRDNAKKTVYLQMNSLRPEDTAVYYCVATPTGRAFTYWGQGTQVTVSS

SEQ ID NO: 4159 - protein, 118 aa, synthetic construct
EVQLLESGGGLVQPGGSLRLSCAASGRTFGNYTMGWFRQAPGKEREFLASIRWTGGSTSYADSVKGRFTISRDNAKKTVYLQMNSLRPEDTAVYYCVAAPTGKAFTYWGQGTQVTVSS

SEQ ID NO: 4160 - protein, 118 aa, synthetic construct
EVQLLESGGGLVQPGGSLRLSCAASGRTFGNYTMGWFRQAPGKEREFLASIRWTGGSTSYADSVKGRFTISRDNAKKTVYLQLNSLRPEDTAVYYCVAAPPGRAFTYWGQGTQVTVSS

SEQ ID NO: 4161 - protein, 118 aa, synthetic construct
EVQLLESGGGLVQPGGSLRLSCAASGHTFGNYTMGWFRQAPGKEREFLASIRWTGGSTSYADSVKGRFTISRDNAKKTVYLQMNSLRPEDTAVYYCVAAPSGRAFTYWGQGTQVTVSS

SEQ ID NO: 4162 - protein, 118 aa, synthetic construct
EVQLLESGGGLVQPGGSLRLSCAASGRTFGNYTMGWFRQAPGKEREFLASIRWTGGSTSYADSVKGRFTISRDNAKKTVYLQMNSLRPEDTAVYYCVAAPAGRAFTYWGQGTQVTVSS

SEQ ID NO: 4163 - protein, 118 aa, synthetic construct
EVQLLESGGGLVQPGGSLRLSCAASGRTFGNYTMGWFRQAPGKEREFLASIRWTGGSTSYADSMKGRFTISRDNAKKTVYLQMNSLRPEDTAVYYCVAAPAGRAFTYWGQGTQVTVSS

SEQ ID NO: 4164 - protein, 118 aa, synthetic construct
EVQLLESGGGLVQPGGSLRLSCAASGRTFGNYTMGWFRQAPGKEREFLASIRWTGGSTSYADSVKGRFTISRDNAKKTVYLQMNSLRPEDTAVYYCVAALTGRAFTYWGQGTQVTVSS

SEQ ID NO: 4165 - protein, 118 aa, synthetic construct
EVQLLESGGGLVQPGGSLRLSCAASGRTFGNYTMGWFRQAPGKEREFLASIRWTGGSTSYADSVKGRFTISRDNAKKTVYLQMNSLRPEDTAVYYCVAAHTGRAFTYWGQGTQVTVSS

SEQ ID NO: 4166 - protein, 118 aa, synthetic construct
EVQLLESGGGLVQPGGSLRLSCAASERTFESDTMGWFRQAPGKEREFLASIRWPGGSTSYADSVKGRFTISRDNAKKTVYLQMNSLRPEDTAVYYCAAAPAGRAFTYEGQGTQVTVSS

SEQ ID NO: 4167 - protein, 118 aa, synthetic construct
EVQLLESGGGLVQPGGSLRLSCAASGRTFGNHTMGWFRQAPGKEREFLASIRWTGGSTSYADSVKGRFTISRDNAKKTVYLQMNSLRPEDTAVYYCVAASTGRAFTYWGQGTQVTVSS

SEQ ID NO: 4168 - protein, 118 aa, synthetic construct; identical to SEQ ID NO: 4162

SEQ ID NO: 4169 - protein, 118 aa, synthetic construct
EVQLLESGGGLVQPGGSLRLSCAASGRTFGNYTMGWFRQAPGKEREFLASIRWTGGSTSYADSVKGRFTISRDNAKKTVYLQMNSLRPEDTAVYYCVAAPTWRAFTYWGQGTQVTVSS

SEQ ID NO: 4170 - protein, 118 aa, synthetic construct
EVQLLESGGGLVQPGGSLRLSCAASGRTFGNYTMGWFRQAPGKEREFLASIRWTGGSTSYADSVKGRFTISRDNAKKTVYLQLNSLRPEDTAVYYCVAAPTVRAFTYWGQGTQVTVSS

SEQ ID NO: 4171 - protein, 118 aa, synthetic construct
EVQLLESGGGLVQPGGSLRLSCAASGRTFGNYTMGWFRQAPGKEREFLASIRWTGGSTSYADSVKGRFTISRDNAKKTVYLQMNSLRPEDTAVYYCVAASTGRAFTYWGQGTQVTVSS

SEQ ID NO: 4172 - protein, 118 aa, synthetic construct
EVQLLESGGGLVQPGGSLRLSCAASGRTFGNYTMGWFRQAPGKEREFLASIRWTGGSTSYADSVKGRFTISRDNAKKTVYLQMNSLRPEDTAVYYCVAAPIGRAFTYWGQGTQVTVSS

SEQ ID NO: 4173 - protein, 8 aa, synthetic construct
GFTFDDIA

SEQ ID NO: 4174 - protein, 8 aa, synthetic construct
GFTFDDIA

SEQ ID NO: 4175 - protein, 8 aa, synthetic construct
GRTFSDYG

SEQ ID NO: 4176 - protein, 8 aa, synthetic construct
GRTFSDYG

SEQ ID NO: 4177 - protein, 8 aa, synthetic construct
GRTFSDYG

SEQ ID NO: 4178 - protein, 8 aa, synthetic construct
GRTFSDYG

SEQ ID NO: 4179 - protein, 8 aa, synthetic construct
GRTFSDYG

SEQ ID NO: 4180 - protein, 8 aa, synthetic construct
GRTFSDYG

SEQ ID NO: 4181 - protein, 8 aa, synthetic construct
GRTFSDYG

SEQ ID NO: 4182 - protein, 8 aa, synthetic construct
GRTFSDYG

SEQ ID NO: 4183 - protein, 8 aa, synthetic construct
GRTFSDYG

SEQ ID NO: 4184 - protein, 8 aa, synthetic construct
GRTFSDYG

SEQ ID NO: 4185 - protein, 8 aa, synthetic construct
GRTFGSYT

SEQ ID NO: 4186 - protein, 8 aa, synthetic construct
GRTFGNYT

SEQ ID NO: 4187 - protein, 8 aa, synthetic construct
GRTFGNYT

SEQ ID NO: 4188 - protein, 8 aa, synthetic construct
GRTFGNYT

SEQ ID NO: 4189 - protein, 8 aa, synthetic construct
GRTFGNYT

SEQ ID NO: 4190 - protein, 8 aa, synthetic construct
GRTFGNYT

SEQ ID NO: 4191 - protein, 8 aa, synthetic construct
GRTFGNYT

SEQ ID NO: 4192 - protein, 8 aa, synthetic construct
GRTFGNYT

SEQ ID NO: 4193 - protein, 8 aa, synthetic construct
GRTFGNYT

SEQ ID NO: 4194 - protein, 8 aa, synthetic construct
GRTFGNYT

SEQ ID NO: 4195 - protein, 8 aa, synthetic construct
GRTFGNYT

SEQ ID NO: 4196 - protein, 8 aa, synthetic construct
GRTFGNYT

SEQ ID NO: 4197 - protein, 8 aa, synthetic construct
GRTFGNYT

SEQ ID NO: 4198 - protein, 8 aa, synthetic construct
GHTFGNYT

SEQ ID NO: 4199 - protein, 8 aa, synthetic construct
GRTFGNYT

SEQ ID NO: 4200 - protein, 8 aa, synthetic construct
GRTFGNYT

SEQ ID NO: 4201 - protein, 8 aa, synthetic construct
GRTFGNYT

SEQ ID NO: 4202 - protein, 8 aa, synthetic construct
GRTFGNYT

SEQ ID NO: 4203 - protein, 8 aa, synthetic construct
ERTFESDT

SEQ ID NO: 4204 - protein, 8 aa, synthetic construct
GRTFGNHT

SEQ ID NO: 4205 - protein, 8 aa, synthetic construct
GRTFGNYT

SEQ ID NO: 4206 - protein, 8 aa, synthetic construct
GRTFGNYT

SEQ ID NO: 4207 - protein, 8 aa, synthetic construct
GRTFGNYT

SEQ ID NO: 4208 - protein, 8 aa, synthetic construct
GRTFGNYT

SEQ ID NO: 4209 - protein, 8 aa, synthetic construct
GRTFGNYT

SEQ ID NO: 4210 - protein, 8 aa, synthetic construct
GSIFRFPP

SEQ ID NO: 4211 - protein, 8 aa, synthetic construct
GSIFRFPP

SEQ ID NO: 4212 - protein, 8 aa, synthetic construct
GSIFRFPP

SEQ ID NO: 4213 - protein, 8 aa, synthetic construct
GFTLDDYA

SEQ ID NO: 4214 - protein, 8 aa, synthetic construct
GFTLDDYA

SEQ ID NO: 4215 - protein, 8 aa, synthetic construct
GFTLDDYA

SEQ ID NO: 4216 - protein, 8 aa, synthetic construct
GFTLDDYA

SEQ ID NO: 4217 - protein, 8 aa, synthetic construct
GFTLDDYA

SEQ ID NO: 4218 - protein, 8 aa, synthetic construct
GFTLDDYA

SEQ ID NO: 4219 - protein, 8 aa, synthetic construct
GFTFDDIA

SEQ ID NO: 4220 - protein, 8 aa, synthetic construct
GFTLDDYA

SEQ ID NO: 4221 - protein, 8 aa, synthetic construct
GFTLDDYA

SEQ ID NO: 4222 - protein, 8 aa, synthetic construct
GFTLDYYT

SEQ ID NO: 4223 - protein, 8 aa, synthetic construct
GFTLDYYT

SEQ ID NO: 4224 - protein, 8 aa, synthetic construct
GVSLDYHT

SEQ ID NO: 4225 - protein, 8 aa, synthetic construct
GVSLDYHT

SEQ ID NO: 4226 - protein, 8 aa, synthetic construct
GFTLDDYT

SEQ ID NO: 4227 - protein, 8 aa, synthetic construct
GVSLDYHT

SEQ ID NO: 4228 - protein, 8 aa, synthetic construct
GVSLDYHT

SEQ ID NO: 4229 - protein, 8 aa, synthetic construct
GVSLDYHT

SEQ ID NO: 4230 - protein, 8 aa, synthetic construct
GVSLDYHT

SEQ ID NO: 4231 - protein, 8 aa, synthetic construct
GVSLDYHT

SEQ ID NO: 4232 - protein, 8 aa, synthetic construct
GFTLGDYT

SEQ ID NO: 4233 - protein, 8 aa, synthetic construct
GVSLDYHT

SEQ ID NO: 4234 - protein, 8 aa, synthetic construct
GFSFDHYA

SEQ ID NO: 4235 - protein, 8 aa, synthetic construct
IYSYGPNT

SEQ ID NO: 4236 - protein, 8 aa, synthetic construct
IYSYGPNT

SEQ ID NO: 4237 - protein, 7 aa, synthetic construct
INWSNAR

SEQ ID NO: 4238 - protein, 7 aa, synthetic construct
INWSNGK

SEQ ID NO: 4239 - protein, 7 aa, synthetic construct
INWSNAR

SEQ ID NO: 4240 - protein, 7 aa, synthetic construct
INWSNAR

SEQ ID NO: 4241 - protein, 7 aa, synthetic construct
INWSNAR

SEQ ID NO: 4242 - protein, 7 aa, synthetic construct
INWSNAR

SEQ ID NO: 4243 - protein, 7 aa, synthetic construct
INWSNAR

SEQ ID NO: 4244 - protein, 7 aa, synthetic construct
INWSNAR

SEQ ID NO: 4245 - protein, 7 aa, synthetic construct
INWSNAR

SEQ ID NO: 4246 - protein, 7 aa, synthetic construct
INWSNAR

SEQ ID NO: 4247 - protein, 8 aa, synthetic construct
IRWTGGST

SEQ ID NO: 4248 - protein, 8 aa, synthetic construct
IRWTGGST

SEQ ID NO: 4249 - protein, 8 aa, synthetic construct
IRWTGGST

SEQ ID NO: 4250 - protein, 8 aa, synthetic construct
IRWTGGST

SEQ ID NO: 4251 - protein, 8 aa, synthetic construct
IRWTGGST

SEQ ID NO: 4252 - protein, 8 aa, synthetic construct
IRWTGGST

SEQ ID NO: 4253 - protein, 8 aa, synthetic construct
IRWTGGST

SEQ ID NO: 4254 - protein, 8 aa, synthetic construct
IRWTGGST

SEQ ID NO: 4255 - protein, 8 aa, synthetic construct
IRWTGGST

SEQ ID NO: 4256 - protein, 8 aa, synthetic construct
IRWTGGST

SEQ ID NO: 4257 - protein, 8 aa, synthetic construct
IRWTGGST

SEQ ID NO: 4258 - protein, 8 aa, synthetic construct
IRWTGGST

SEQ ID NO: 4259 - protein, 8 aa, synthetic construct
IRWTGGST

SEQ ID NO: 4260 - protein, 8 aa, synthetic construct
IRWTGGST

SEQ ID NO: 4261 - protein, 8 aa, synthetic construct
IRWTGGST

SEQ ID NO: 4262 - protein, 8 aa, synthetic construct
IRWTGGST

SEQ ID NO: 4263 - protein, 8 aa, synthetic construct
IRWTGGST

SEQ ID NO: 4264 - protein, 8 aa, synthetic construct
IRWTGGST

SEQ ID NO: 4265 - protein, 8 aa, synthetic construct
IRWPGGST

SEQ ID NO: 4266 - protein, 8 aa, synthetic construct
IRWTGGST

SEQ ID NO: 4267 - protein, 8 aa, synthetic construct
IRWTGGST

SEQ ID NO: 4268 - protein, 8 aa, synthetic construct
IRWTGGST

SEQ ID NO: 4269 - protein, 8 aa, synthetic construct
IRWTGGST

SEQ ID NO: 4270 - protein, 8 aa, synthetic construct
IRWTGGST

SEQ ID NO: 4271 - protein, 8 aa, synthetic construct
IRWTGGST

SEQ ID NO: 4272 - protein, 7 aa, synthetic construct
LTSGGST

SEQ ID NO: 4273 - protein, 7 aa, synthetic construct
LTSGGST

SEQ ID NO: 4274 - protein, 7 aa, synthetic construct
LTSGGST

SEQ ID NO: 4275 - protein, 8 aa, synthetic construct
IFSYSSNT

SEQ ID NO: 4276 - protein, 8 aa, synthetic construct
IFSYSTNT

SEQ ID NO: 4277 - protein, 8 aa, synthetic construct
IFSYSSNT

SEQ ID NO: 4278 - protein, 8 aa, synthetic construct
IFSYSSNT

SEQ ID NO: 4279 - protein, 8 aa, synthetic construct
IFSYSSNT

SEQ ID NO: 4280 - protein, 8 aa, synthetic construct
IFSYSSNT

SEQ ID NO: 4281 - protein, 8 aa, synthetic construct
IYSYGPNT

SEQ ID NO: 4282 - protein, 8 aa, synthetic construct
IFSYSSNT

SEQ ID NO: 4283 - protein, 8 aa, synthetic construct
IFSYSSNT

SEQ ID NO: 4284 - protein, 8 aa, synthetic construct
ISSNDGSV

SEQ ID NO: 4285 - protein, 8 aa, synthetic construct
ISSNDGSV

SEQ ID NO: 4286 - protein, 8 aa, synthetic construct
ISSHDGSI

SEQ ID NO: 4287 - protein, 8 aa, synthetic construct
INSNDGTT

SEQ ID NO: 4288 - protein, 8 aa, synthetic construct
IDRFDGSV

SEQ ID NO: 4289 - protein, 8 aa, synthetic construct
ISSNDGST

SEQ ID NO: 4290 - protein, 8 aa, synthetic construct
ISSNDGST

SEQ ID NO: 4291 - protein, 8 aa, synthetic construct
ISSIDGST

SEQ ID NO: 4292 - protein, 8 aa, synthetic construct
INSNDGTT

SEQ ID NO: 4293 - protein, 8 aa, synthetic construct
INSNDGTT

SEQ ID NO: 4294 - protein, 8 aa, synthetic construct
ISHDDGST

SEQ ID NO: 4295 - protein, 8 aa, synthetic construct
ISSNDGST

SEQ ID NO: 4296 - protein, 8 aa, synthetic construct
ISNNDGSV

SEQ ID NO: 4297 - protein, 16 aa, synthetic construct
AADSDLSTVTVGPHDY

SEQ ID NO: 4298 - protein, 16 aa, synthetic construct
AADSDLSTVVYGPHDY

SEQ ID NO: 4299 - protein, 11 aa, synthetic construct
AATPSGKAYSY

SEQ ID NO: 4300 - protein, 11 aa, synthetic construct
AATPSGKAYSY

SEQ ID NO: 4301 - protein, 11 aa, synthetic construct
AAAPSGKAYSY

SEQ ID NO: 4302 - protein, 11 aa, synthetic construct
AATASGKAYSY

SEQ ID NO: 4303 - protein, 11 aa, synthetic construct
AATPAGKAYSY

SEQ ID NO: 4304 - protein, 11 aa, synthetic construct
AATPSAKAYSY

SEQ ID NO: 4305 - protein, 11 aa, synthetic construct
AATPSGAAYSY

SEQ ID NO: 4306 - protein, 11 aa, synthetic construct
AATPSGKAASY

SEQ ID NO: 4307 - protein, 11 aa, synthetic construct
AATPSGKAYAY

SEQ ID NO: 4308 - protein, 11 aa, synthetic construct
AATPSGKAYSA

SEQ ID NO: 4309 - protein, 11 aa, synthetic construct
VASPTGRAFTY

SEQ ID NO: 4310 - protein, 11 aa, synthetic construct
VAAPPGRAFTY

SEQ ID NO: 4311 - protein, 11 aa, synthetic construct
VAAPTGREFTY

SEQ ID NO: 4312 - protein, 11 aa, synthetic construct
VAAPTGSAFTY

SEQ ID NO: 4313 - protein, 11 aa, synthetic construct
VAAPTVRAFTY

SEQ ID NO: 4314 - protein, 11 aa, synthetic construct
VAATTGRAFTY

SEQ ID NO: 4315 - protein, 11 aa, synthetic construct
VAAPTGRAFTY

SEQ ID NO: 4316 - protein, 11 aa, synthetic construct
VAAPSGRAFTY

SEQ ID NO: 4317 - protein, 11 aa, synthetic construct
VAAPTGRALTY

SEQ ID NO: 4318 - protein, 11 aa, synthetic construct
VAAPTGRAYTY

SEQ ID NO: 4319 - protein, 11 aa, synthetic construct
VATPTGRAFTY

SEQ ID NO: 4320 - protein, 11 aa, synthetic construct
VAAPTGKAFTY

SEQ ID NO: 4321 - protein, 11 aa, synthetic construct
VAAPPGRAFTY

SEQ ID NO: 4322 - protein, 11 aa, synthetic construct
VAAPSGRAFTY

SEQ ID NO: 4323 - protein, 11 aa, synthetic construct
VAAPAGRAFTY

SEQ ID NO: 4324 - protein, 11 aa, synthetic construct
VAAPAGRAFTY

SEQ ID NO: 4325 - protein, 11 aa, synthetic construct
VAALTGRAFTY

SEQ ID NO: 4326 - protein, 11 aa, synthetic construct
VAAHTGRAFTY

SEQ ID NO: 4327 - protein, 11 aa, synthetic construct
AAAPAGRAFTY

SEQ ID NO: 4328 - protein, 11 aa, synthetic construct
VAASTGRAFTY

SEQ ID NO: 4329 - protein, 11 aa, synthetic construct
VAAPAGRAFTY

SEQ ID NO: 4330 - protein, 11 aa, synthetic construct
VAAPTWRAFTY

SEQ ID NO: 4331 - protein, 11 aa, synthetic construct
VAAPTVRAFTY

SEQ ID NO: 4332 - protein, 11 aa, synthetic construct
VAASTGRAFTY

SEQ ID NO: 4333 - protein, 11 aa, synthetic construct
VAAPIGRAFTY

SEQ ID NO: 4334 - protein, 10 aa, synthetic construct
SVLGRDLVTY

SEQ ID NO: 4335 - protein, 10 aa, synthetic construct
SVLGRDRVTY

SEQ ID NO: 4336 - protein, 10 aa, synthetic construct
SVLGRDIVTY

SEQ ID NO: 4337 - protein, 15 aa, synthetic construct
AVGDFEGELVLKGDY

SEQ ID NO: 4338 - protein, 15 aa, synthetic construct
AVGDFEGELVLKGDY

SEQ ID NO: 4339 - protein, 15 aa, synthetic construct
AVGDFEGELVLKGDY

SEQ ID NO: 4340 - protein, 15 aa, synthetic construct
AVGDFEGELVLKGDY

SEQ ID NO: 4341 - protein, 15 aa, synthetic construct
AVGDLEGELVLKGDY

SEQ ID NO: 4342 - protein, 15 aa, synthetic construct
AVGDFEGELVLEGDY

SEQ ID NO: 4343 - protein, 15 aa, synthetic construct
AVGDFEGELVLKGDY

SEQ ID NO: 4344 - protein, 15 aa, synthetic construct
AVGDFEGELVLKGDY

SEQ ID NO: 4345 - protein, 15 aa, synthetic construct
AVGDFEGELVLKGDY

SEQ ID NO: 4346 - protein, 21 aa, synthetic construct
AADLGFLYVDYVRLHTHHFGS

SEQ ID NO: 4347 - protein, 21 aa, synthetic construct
AADLGYLYVDYVRLHTHHFGS

SEQ ID NO: 4348 - protein, 21 aa, synthetic construct
AADVGVLYADYVRLHMHHFGS

SEQ ID NO: 4349 - protein, 21 aa, synthetic construct
AADLGVLYTDYVRLHMHHFGS

SEQ ID NO: 4350 - protein, 21 aa, synthetic construct
AADLGFLYVDYVRLHTHHFGS

SEQ ID NO: 4351 - protein, 21 aa, synthetic construct
AADVGVLYADYVRLHTHHFGS

SEQ ID NO: 4352 - protein, 21 aa, synthetic construct
AADVGVLYADYVRLHTHHFGS

SEQ ID NO: 4353 - protein, 21 aa, synthetic construct
AADVGVLYADYVRLHMHHFGS

SEQ ID NO: 4354 - protein, 21 aa, synthetic construct
AADLGVLYTDYVRLHMHHFGS

SEQ ID NO: 4355 - protein, 21 aa, synthetic construct
AADLGVLYTDYVRLHMHHFGS

SEQ ID NO: 4356 - protein, 21 aa, synthetic construct
AADLGFLYADYVRLYTHHFGS

SEQ ID NO: 4357 - protein, 21 aa, synthetic construct
AADVGVLYADYVPLHMHHFGS

SEQ ID NO: 4358 - protein, 21 aa, synthetic construct
AADLGFLYVDYVPLHTHHFGS

SEQ ID NO: 4359 - protein, 123 aa, synthetic construct
EVQLLESGGGLVQPGGSLRLSCAASGFTFDDIAMTWVRQAPGKGLEWVSSIYSYGPNTYYADSVKGRFTISTDSAKNTLYLQMNSLRPEDTAVYYCAADSDLSTVTVGPHDYWGQGTQVTVSS

SEQ ID NO: 4360 - protein, 123 aa, synthetic construct
EVQLLESGGGLVQPGGSLRLSCAASGFTFDDIAMTWVRQAPGKGLEWVSSIYSYGPNTYYADSVKGRFTISTDSAKNTLYLQMNSLRPEDTAVYYCAADSDLSTVVTGPHDYWGQGTQVTVSS

SEQ ID NO: 4361 - protein, 118 aa, synthetic construct
EVQLLESGGGLVQPGGSLRLSCAASGRTFSDYGMGWFRQAPGKDSEFVAAINWSNARTNYADSVKGRFTISRDNAKNTGYLQMNSLRVEDTAVYYCAATPSGKAYSYWGQGTQVTVSS

SEQ ID NO: 4362 - protein, 118 aa, synthetic construct
EVQLLESGGGLVQPGGSLRLSCAASGRTFSDYGMGWFRQAPGKDSEFVAAINWSNGKTNYADSVKGRFTISRDNAKNTGYLQMNSLRVEDTAVYYCAATPSGKAYSYWGQGTQVTVSS

SEQ ID NO: 4363 - protein, 118 aa, synthetic construct
EVQLLESGGGLVQPGGSLRLSCAASGRTFSDYGMGWFRQAPGKDSEFVAAINWSNARTNYADSVKGRFTISRDNAKNTGYLQMNSLRVEDTAVYYCAAAPSGKAYSYWGQGTQVTVSS

SEQ ID NO: 4364 - protein, 118 aa, synthetic construct
EVQLLESGGGLVQPGGSLRLSCAASGRTFSDYGMGWFRQAPGKDSEFVAAINWSNARTNYADSVKGRFTISRDNAKNTGYLQMNSLRVEDTAVYYCAATASGKAYSYWGQGTQVTVSS

SEQ ID NO: 4365 - protein, 118 aa, synthetic construct
EVQLLESGGGLVQPGGSLRLSCAASGRTFSDYGMGWFRQAPGKDSEFVAAINWSNARTNYADSVKGRFTISRDNAKNTGYLQMNSLRVEDTAVYYCAATPAGKAYSYWGQGTQVTVSS

SEQ ID NO: 4366 - protein, 118 aa, synthetic construct
EVQLLESGGGLVQPGGSLRLSCAASGRTFSDYGMGWFRQAPGKDSEFVAAINWSNARTNYADSVKGRFTISRDNAKNTGYLQMNSLRVEDTAVYYCAATPSAKAYSYWGQGTQVTVSS

SEQ ID NO: 4367 - protein, 118 aa, synthetic construct
EVQLLESGGGLVQPGGSLRLSCAASGRTFSDYGMGWFRQAPGKDSEFVAAINWSNARTNYADSVKGRFTISRDNAKNTGYLQMNSLRVEDTAVYYCAATPSGAAYSYWGQGTQVTVSS

SEQ ID NO: 4368 - protein, 118 aa, synthetic construct
EVQLLESGGGLVQPGGSLRLSCAASGRTFSDYGMGWFRQAPGKDSEFVAAINWSNARTNYADSVKGRFTISRDNAKNTGYLQMNSLRVEDTAVYYCAATPSGKAASYWGQGTQVTVSS

SEQ ID NO: 4369 - protein, 118 aa, synthetic construct
EVQLLESGGGLVQPGGSLRLSCAASGRTFSDYGMGWFRQAPGKDSEFVAAINWSNARTNYADSVKGRFTISRDNAKNTGYLQMNSLRVEDTAVYYCAATPSGKAYAYWGQGTQVTVSS

SEQ ID NO: 4370 - protein, 118 aa, synthetic construct
EVQLLESGGGLVQPGGSLRLSCAASGRTFSDYGMGWFRQAPGKDSEFVAAINWSNARTNYADSVKGRFTISRDNAKNTGYLQMNSLRVEDTAVYYCAATPSGKAYSAWGQGTQVTVSS

SEQ ID NO: 4371 - protein, 118 aa, synthetic construct; identical to SEQ ID NO: 4072

SEQ ID NO: 4372 - protein, 118 aa, synthetic construct; identical to SEQ ID NO: 4102

SEQ ID NO: 4373 - protein, 118 aa, synthetic construct; identical to SEQ ID NO: 4103

SEQ ID NO: 4374 - protein, 118 aa, synthetic construct; identical to SEQ ID NO: 4104

SEQ ID NO: 4375 - protein, 118 aa, synthetic construct; identical to SEQ ID NO: 4105

SEQ ID NO: 4376 - protein, 118 aa, synthetic construct; identical to SEQ ID NO: 4106

SEQ ID NO: 4377 - protein, 118 aa, synthetic construct; identical to SEQ ID NO: 4107

SEQ ID NO: 4378 - protein, 118 aa, synthetic construct; identical to SEQ ID NO: 4108

SEQ ID NO: 4379 - protein, 118 aa, synthetic construct; identical to SEQ ID NO: 4109

SEQ ID NO: 4380 - protein, 118 aa, synthetic construct; identical to SEQ ID NO: 4110

SEQ ID NO: 4381 - protein, 118 aa, synthetic construct; identical to SEQ ID NO: 4111

SEQ ID NO: 4382 - protein, 118 aa, synthetic construct; identical to SEQ ID NO: 4112

SEQ ID NO: 4383 - protein, 118 aa, synthetic construct; identical to SEQ ID NO: 4113

SEQ ID NO: 4384 - protein, 118 aa, synthetic construct; identical to SEQ ID NO: 4114

SEQ ID NO: 4385 - protein, 118 aa, synthetic construct; identical to SEQ ID NO: 4115

SEQ ID NO: 4386 - protein, 118 aa, synthetic construct; identical to SEQ ID NO: 4116

SEQ ID NO: 4387 - protein, 118 aa, synthetic construct; identical to SEQ ID NO: 4117

SEQ ID NO: 4388 - protein, 118 aa, synthetic construct; identical to SEQ ID NO: 4118

SEQ ID NO: 4389 - protein, 118 aa, synthetic construct; identical to SEQ ID NO: 4119

SEQ ID NO: 4390 - protein, 118 aa, synthetic construct; identical to SEQ ID NO: 4120

SEQ ID NO: 4391 - protein, 118 aa, synthetic construct; identical to SEQ ID NO: 4121

SEQ ID NO: 4392 - protein, 118 aa, synthetic construct; identical to SEQ ID NO: 4122

SEQ ID NO: 4393 - protein, 118 aa, synthetic construct; identical to SEQ ID NO: 4123

SEQ ID NO: 4394 - protein, 118 aa, synthetic construct; identical to SEQ ID NO: 4124

SEQ ID NO: 4395 - protein, 118 aa, synthetic construct; identical to SEQ ID NO: 4125

SEQ ID NO: 4396 - protein, 116 aa, synthetic construct
EVQLVESGGGLVQPGGSLRLSCAASGSIFRFPPMGWYRQAPGKQREQVAQLTSGGSTNYADSVKGRFTISRDNAKNTWYLQMNSLRPEDTAVYYCSVLGRDLVTYWGQGTQVTVSS

SEQ ID NO: 4397 - protein, 116 aa, synthetic construct
EVQLVESGGGLVQPGGSLRLSCAASGSIFRFPPMGWYRQAPGKQREQVAQLTSGGSTNYADSVKGRFTISRDNAKNTWYLQMNSLRPEDTAVYYCSVLGRDRVTYWGQGTQVTVSS

SEQ ID NO: 4398 - protein, 116 aa, synthetic construct
EVQLVESGGGLVQPGGSLRLSCAASGSIFRFPPMGWYRQAPGKQREQVAQLTSGGSTNYADSVKGRFTISRDNAKNTWYLQMNSLRPEDTAVYYCSVLGRDIVTYWGQGTQVTVSS

SEQ ID NO: 4399 - protein, 122 aa, synthetic construct; identical to SEQ ID NO: 4064

SEQ ID NO: 4400 - protein, 122 aa, synthetic construct; identical to SEQ ID NO: 4080

SEQ ID NO: 4401 - protein, 122 aa, synthetic construct; identical to SEQ ID NO: 4081

SEQ ID NO: 4402 - protein, 122 aa, synthetic construct; identical to SEQ ID NO: 4082

SEQ ID NO: 4403 - protein, 122 aa, synthetic construct; identical to SEQ ID NO: 4083

SEQ ID NO: 4404 - protein, 122 aa, synthetic construct; identical to SEQ ID NO: 4084

SEQ ID NO: 4405 - protein, 122 aa, synthetic construct; identical to SEQ ID NO: 4085

SEQ ID NO: 4406 - protein, 122 aa, synthetic construct; identical to SEQ ID NO: 4086

SEQ ID NO: 4407 - protein, 122 aa, synthetic construct; identical to SEQ ID NO: 4087

SEQ ID NO: 4408 - protein, 128 aa, synthetic construct; identical to SEQ ID NO: 4088

SEQ ID NO: 4409 - protein, 128 aa, synthetic construct; identical to SEQ ID NO: 4068

SEQ ID NO: 4410 - protein, 128 aa, synthetic construct; identical to SEQ ID NO: 4090

SEQ ID NO: 4411 - protein, 128 aa, synthetic construct; identical to SEQ ID NO: 4091

SEQ ID NO: 4412 - protein, 128 aa, synthetic construct; identical to SEQ ID NO: 4092

SEQ ID NO: 4413 - protein, 128 aa, synthetic construct; identical to SEQ ID NO: 4093

SEQ ID NO: 4414 - protein, 128 aa, synthetic construct; identical to SEQ ID NO: 4094

SEQ ID NO: 4415 - protein, 128 aa, synthetic construct; identical to SEQ ID NO: 4095

SEQ ID NO: 4416 - protein, 128 aa, synthetic construct; identical to SEQ ID NO: 4096

SEQ ID NO: 4417 - protein, 128 aa, synthetic construct; identical to SEQ ID NO: 4097

SEQ ID NO: 4418 - protein, 128 aa, synthetic construct; identical to SEQ ID NO: 4098

SEQ ID NO: 4419 - protein, 128 aa, synthetic construct; identical to SEQ ID NO: 4099

SEQ ID NO: 4420 - protein, 128 aa, synthetic construct; identical to SEQ ID NO: 4100

SEQ ID NO: 4421 - DNA, 369 bp, synthetic construct
  source 1..369: mol_type = other DNA
gaggtacagctgttggagagtgggggcggactcgtgcagcctggagggtcacttagactcagttgtgcggctagcggcttcacattcgacgacatcgctatgacatgggtgagacaggcacccggcaagggccttgaatgggtgtcctctatatactcttacgggccaaacacatattacgccgattccgtcaaggggcggtttactatttccactgattcagcaaagaacaccttgtatctgcagatgaattccttgcgcccagaagatacggccgtgtactactgtgccgcagacagcgatctgagcactgtgacagtgggcccacatgactactggggtcaagggacccaggtgacggtgagcagc

SEQ ID NO: 4422 - DNA, 369 bp, synthetic construct
  source 1..369: mol_type = other DNA
gaggtgcagctgctggagagcggcggcggcctggtgcagcccggcggcagcctgagactgagctgcgccgccagcggcttcaccttcgacgacatcgccatgacctgggtgagacaggcccccggcaagggcctggagtgggtgagcagcatctacagctacggccccaacacctactacgccgacagcgtgaagggcagattcaccatcagcaccgacagcgccaagaacaccctgtacctgcagatgaacagcctgagacccgaggacaccgccgtgtactactgcgccgccgacagcgacctgagcaccgtggtgaccggcccccacgactactggggccagggcacccaggtgaccgtgagcagc

SEQ ID NO: 4423 - DNA, 354 bp, synthetic construct
  source 1..354: mol_type = other DNA
gaggtgcagctcctggaatctgggggcggtctcgtgcaaccgggcggatccctccggctgtcatgtgcggccagcgggaggacatttagcgactatggaatgggctggtttagacaggcaccgggaaaggacagcgagtttgtcgccgctatcaactggtctaacgccaggactaactacgcagacagtgtgaaaggacgcttcaccatttcccgcgacaatgctaagaatactggctacctgcagatgaacagtctcagagtggaagatacggctgtatactactgtgctgccacacctagcggcaaggcttatagctactgggggcagggaacacaggtcaccgttagcagc

SEQ ID NO: 4424 - DNA, 354 bp, synthetic construct
  source 1..354: mol_type = other DNA
gaggtgcagctgctcgaatcagggggaggcctcgtgcagcctgggggctcacttcgccttagctgtgcagcgtctggtcgaactttctctgactatggcatggggtggttcaggcaggcaccaggcaaggattcagagtttgtggccgcgatcaactggtccaatggaaaaacgaattacgctgactctgtcaaagggcggtttaccatatccagggacaatgcgaagaatacagggtaccttcagatgaattccttgcgggtggaggacaccgcagtgtactactgtgccgcaacgccatccggaaaagcctactcctattggggacaggggacacaggtgaccgtatcatca

SEQ ID NO: 4425 - DNA, 354 bp, synthetic construct
  source 1..354: mol_type = other DNA
gaggtgcaattgctggagtccgggggcggtttggtgcagcccgggggtagcctcagattgagttgcgccgcatccgggcgaacattcagtgactacgggatggggtggtttagacaggcacctggcaaggacagtgagtttgtggctgcgattaattggtccaacgctaggaccaactacgcggattcagtcaagggacgcttcaccatctccagagacaatgccaagaacacagggtacctgcaaatgaactccctcagggtggaggacaccgcagtgtactactgcgctgcagccccgtcaggaaaggcctattcctactgggggcaggggactcaagtcacggtaagcagc

SEQ ID NO: 4426 - DNA, 354 bp, synthetic construct
  source 1..354: mol_type = other DNA
gaggtccagttgttggagagcggaggaggcctggtccagccgggtggcagtcttcggctgagctgtgcagccagtggacgaacattcagtgactacgggatggggtggtttcgccaggcaccgggcaaagattcagagttcgttgctgcgatcaattggtccaacgccaggacaaattacgcggactccgtcaagggaagattcactatatccagggataacgctaagaacaccgggtacttgcagatgaattccctgagggtcgaggatacggctgtgtactactgtgccgcaacggcatccggcaaggcgtacagctattgggggcaaggcacccaggtgacggtaagcagc

SEQ ID NO: 4427 - DNA, 354 bp, synthetic construct
  source 1..354: mol_type = other DNA
gaggtccagcttctcgaatcaggtggcggactggtccagccagggggctctttgcggttgtcttgtgccgccagcgggagaaccttctcagactacggaatggggtggtttaggcaggctcctggcaaagacagtgagttcgtggccgcgatcaattggtccaatgcaaggacgaactacgcggattccgtcaagggccggttcaccatatcccgggataatgcaaagaatacgggataccttcagatgaattccttgagagtggaggatactgccgtctactactgcgcggccaccccggcagggaaagcttactcctattgggggcaggggacacaggtgacagtaagcagc

SEQ ID NO: 4428 - DNA, 354 bp, synthetic construct
  source 1..354: mol_type = other DNA
gaggtgcagcttcttgagtccggagggggactcgtccagccgggcggatcccttaggttgagctgcgccgcttcaggaagaacgttcagcgactatgggatggggtggtttagacaggcacccggcaaagattctgagttcgttgccgcgattaactggtccaatgctagaacaaactacgcggactctgtcaaggggcgattcacaatttccagagacaacgcgaagaacactgggtatctccagatgaattccctcagagtcgaagatacggccgtatactactgcgcagccacgcccagtgccaaggcatatagctactggggccaagggacacaagtaacagttagcagc

SEQ ID NO: 4429 - DNA, 354 bp, synthetic construct
  source 1..354: mol_type = other DNA
gaggtgcagcttctcgagtccggcgggggattggtacagcccggagggagcctgcgattgagttgcgccgcgagtggcaggactttcagtgactatgggatggggtggtttcgacaagccccgggtaaggattcagagtttgtagccgcaattaactggagcaatgcgcggaccaactacgcagacagtgtcaagggaagattcactatttccagagataacgccaagaacaccggctacctccagatgaattccctcagagttgaggatacggccgtgtactactgcgcagctacgcccagcggggccgcctacagctactgggggcaaggaactcaggtgacggtaagcagc

SEQ ID NO: 4430 - DNA, 354 bp, synthetic construct
  source 1..354: mol_type = other DNA
gaggttcagttgctcgagtccggagggggtctggtacagcccgggggatccctccgcctgtcttgcgcggcttccggacgcactttcagtgattatgggatgggctggttcaggcaggccccggggaaggacagcgagtttgtggctgccattaactggtcaaacgcgcggaccaactatgcggacagcgtcaagggacgattcactatctccagagataatgccaagaacacagggtacttgcaaatgaacagtctgcgagtcgaagatacggccgtttactactgtgctgctacgccgagtggcaaggccgctagctactggggccaggggacccaggtaacggtaagcagc

SEQ ID NO: 4431 - DNA, 354 bp, synthetic construct
  source 1..354: mol_type = other DNA
gaggtgcagcttcttgagagtggcgggggattggtgcagcctgggggctctttgagactcagttgcgctgcgagcggccgcaccttctcagactatggaatggggtggtttcggcaggccccaggcaaggattccgagttcgtggctgcgattaattggtccaacgccaggaccaactatgcggattctgtcaagggccgctttaccatttccagagataatgctaagaataccgggtaccttcaaatgaattccctgagggtggaagacacggctgtgtattactgcgccgcaacgccctccgggaaggcttatgcctattggggacaggggacacaggtgaccgtgagcagc

SEQ ID NO: 4432 - DNA, 354 bp, synthetic construct
  source 1..354: mol_type = other DNA
gaggtgcagctcctcgagtctggtgggggccttgttcagcccgggggttcactccgattgagttgcgcagccagcggaagaaccttcagcgactacggcatggggtggttccgacaggcacccggcaaagactccgagttcgtggccgcgataaattggtccaacgctcgcaccaactacgcggacagtgtcaagggtaggttcacgatctctcgggacaatgctaagaatacaggatacctgcagatgaactccttgcgagtggaggataccgctgtgtattactgtgccgcaacgccgagtgggaaggcatactcagcatggggccaggggacacaagtgacggtaagcagc

SEQ ID NO: 4433 - DNA, 354 bp, synthetic construct
  source 1..354: mol_type = other DNA
gaggtgcagctggtggagtctgggggaggattggtggaggctgggggctctctgagactctcctgtgcagcctctggacgcaccttcgggagctataccatgggctggttccgccaggctccagggagggagcgtgagtttttagcaagtattaggtggactggtggtagcacaagttatgcagactccgtgaagggccgattcaccatctccagagacgacgccaagaaggcggtgtatctgcaaatgaacagcctgaaacctgaggacacggccgtttattattgtgtagcatcccccaccgggagagcgtttacctactggggccaggggacccaggtcaccgtctcctca

SEQ ID NO: 4434 - DNA, 354 bp, synthetic construct
  source 1..354: mol_type = other DNA
gaggtgcagctggtggagtctgggggaggattagtggagactgggggctctctgagactctcctgtgcagcctctggacgcaccttcgggaactataccatgggctggttccgccaggctccagggagggagcgtgagtttttagcaagtattaggtggactggtggtagcacaagttatgcagactccgtgaagggccgattcaccatctccagagacaacgccaagaaggcggtgtatctgcaaatgaacagcctgaaacctgaggacacggccgtttattcctgtgtagcagccccccccgggagagcgtttacctactggggccaggggacccaggtcaccgtctcctca

SEQ ID NO: 4435 - DNA, 354 bp, synthetic construct
  source 1..354: mol_type = other DNA
gaggtgcagctggtggagtctgggggaggattggtggagactgggggctctctgagactctcctgtgcagcctctggacgcaccttcgggaactataccatgggctggttccgccaggctccagggagggagcgtgagtttttagcaagtattaggtggactggtggtagcacaagttatgcagactccgtgaagggccgattcaccatctccagagacaacgccaagaaggcggtgtatctgcaaatgaacagcctgaaacctgaggacacggccgtttattcctgtgtagcagcccccaccgggagagagtttacctactggggccaggggacccaggtcaccgtctcctca

SEQ ID NO: 4436 - DNA, 354 bp, synthetic construct
  source 1..354: mol_type = other DNA
gaggtgcagctggtggagtctgggggaggattggtggagactgggggctctctgagactctcctgtgcagcctctggacgcaccttcgggaactataccatgggctggttccgccaggctccagggagggagcgtgagtttttagcaagtattaggtggactggtggtagcacaagttatgcagactccgtgaagggccgattcaccatctccagagacaacgccaagaaggcggtgtatctgcaaatgaacagcctgaaacctgaggacacggccgtttattcctgtgtagcagcccccaccgggagtgcgtttacctactggggccaggggacccaggtcaccgtctcctca

SEQ ID NO: 4437 - DNA, 354 bp, synthetic construct
  source 1..354: mol_type = other DNA
gaggtgcagctggtggagtctgggggaggattggtggagactgggggctctctgagactctcctgtgcagcctctggacgcaccttcgggaactataccatgggctggttccgccaggctccagggagggagcgtgagtttttagcaagtattaggtggactggtggtagcacaagttatgcagactccgtgaagggccgattcaccatctccagagacaacgccaagaaggcggtgtatctgcaaatgaacagcctgaaacctgaggacacggccgtttattcctgtgtagcagcccccaccgtgagagcgtttacctactggggccaggggacccaggtcaccgtctcctca

SEQ ID NO: 4438 - DNA, 354 bp, synthetic construct
  source 1..354: mol_type = other DNA
gaggtgcagctggtggagtctgggggaggattggtggagactgggggctctctgagactctcctgtgcagcctctggacgcaccttcgggaactataccatgggctggttccgccaggctccagggagggagcgtgagtttttagcaagtattaggtggactggtggtagcacaagttatgcagactccgtgaagggccgattcaccatctccagagacaacgccaagaaggcggtgtatctgcaaatgaacagcctgaaacctgaggacacggccgtttattcctgtgtagcagccaccaccgggagagcgtttacctactggggccaggggacccaggtcaccgtctcctca

SEQ ID NO: 4439 - DNA, 354 bp, synthetic construct
  source 1..354: mol_type = other DNA
gaggtgcagctggtggagtctgggggaggattggtggagactgggggctctctgagactctcctgtgcagcctctggacgcaccttcgggaactataccatgggctggttccgccaggctccagggagggagcgtgagtttttagcaagtattaggtggactggtggtagcacaagttatgcagactccgtgaagggccgattcaccatctccagagacaacgccaagaaggcggtgtatctgcaaatgaacagcctgaaacctgaggacacggccgtttattcctgtgtagcagcccccaccgggagagcgtttacctactggggccaggggacccaggtcaccgtctcctca

SEQ ID NO: 4440 - DNA, 354 bp, synthetic construct
  source 1..354: mol_type = other DNA
gaggtgcagctggtggagtctgggggaggattggtggagactgggggctctctgagactctcctgtgcagcctctggacgcaccttcgggaactataccatgggctggttccgccaggctccagggagggagcgagagtttttagcaagtattaggtggactggtggtagcacaagttatgcagactccgtgaagggccgattcaccatctccagagacaacgccaagaaggcggtgtatctgcaaatgaacagcctgaaacctgaggacacggccgtttattcctgtgtagcagccccctccgggagagcgtttacctactggggccaggggacccaggtcaccgtctcctca

SEQ ID NO: 4441 - DNA, 354 bp, synthetic construct
  source 1..354: mol_type = other DNA
gaggtgcagctggtggagtctgggggaggattggtggagactgggggctctctgagactctcctgtgcagcctctggacgcaccttcgggaactataccatgggctggttccgccaggctccagggagggagcgtgagtttttagcaagtattaggtggactggtggtagcacaagttatgcagactccgtgaagggccgattcaccatctccagagacaacgccaagaaggcggtgtatctgcaaatgaacagcctgaaacctgaggacacggccgtttattcctgtgtagcagcccccaccgggagagcgttgacctactggggccaggggacccaggtcaccgtctcctca

SEQ ID NO: 4442 - DNA, 354 bp, synthetic construct
  source 1..354: mol_type = other DNA
gaggtgcagctggtggagtctgggggaggattggtggagactgggggctctctgagactctcctgtgcagcctctggacgcaccttcgggaactataccatgggctggttccgccaggctccagggagggagcgtgagtttttagcaagtattaggtggactggtggtagcacaagttatgcagactccgtgaaaggccgattcaccatctccagagacaacgccaagaaggcggtgtatctgcaaatgaacagcctgaaacctgaggacacggccgtttattcctgtgtagcagcccccaccgggagagcgtatacctactggggccaggggacccaggtcaccgtctcctca

SEQ ID NO: 4443 - DNA, 354 bp, synthetic construct
  source 1..354: mol_type = other DNA
gaggtgcagctggtggagtctgggggaggattggtggagactgggggctctctgagactctcctgtgcagcctctggacgcaccttcgggaactataccatgggctggttccgccaggctccagggagggagcgtgagtttttagcaagtattaggtggactggtggtagcacaagctatgcagactccgtgaaaggccgattcaccatctccagagacaacgccaagaaggcggtgtatctgcaaatgaacagcctgaaacctgaggacacggccgtttattcctgtgtagcaacccccaccgggagagcgtttacctactggggccaggggacccaggtcaccgtctcctca

SEQ ID NO: 4444 - DNA, 354 bp, synthetic construct
  source 1..354: mol_type = other DNA
gaggtgcagctggtggagtctgggggaggattggtggagactgggggctctctgagactctcctgtgcagcctctggacgcaccttcgggaactataccatgggctggttccgccaggctccagggagggagcgtgagtttttagcaagtattaggtggactggtggtagcacaagttatgcagactccgtgaagggccgattcaccatctccagagacaacgccaagaaggcggtgtatctgcaaatgaacagcctgaaacctgaggacacggccgtttattcctgtgtagcagcccccaccgggaaagcgtttacctactggggccaggggacccaggtcaccgtctcctca

SEQ ID NO: 4445 - DNA, 354 bp, synthetic construct
  source 1..354: mol_type = other DNA
gaggtgcagctggtggagtctgggggaggattggtggagactgggggctctctgagactctcctgtgcagcctctggacgcaccttcgggaactataccatgggctggttccgccaggctccagggagggagcgtgagtttttagcaagtattaggtggactggtggtagcacaagttatgcagactccgtgaagggccgattcaccatctccagagacaacgccaagaaggcggtgtatctgcaactgaacagcctgaaacctgaggacacggccgtttattcctgtgtagcagccccccccgggagagcgtttacctactggggccaggggacccaggtcaccgtctcctca

SEQ ID NO: 4446 - DNA, 354 bp, synthetic construct
  source 1..354: mol_type = other DNA
gaggtgcagctggtggagtctgggggaggattggtggagactgggggctctctgagactctcctgtgcagcctctggacacaccttcgggaactataccatgggctggttccgccaggctccagggagggagcgtgagtttttggcaagtattaggtggactggtggtagcacaagttatgcagactccgtgaagggccgattcaccatctccagagacaacgccaagaaggcggtgtatctgcaaatgaacagcctgaaacctgaggacacggccgtttattcctgtgtagcagccccctccgggagagcgtttacctactggggccaggggacccaggtcaccgtctcctca

SEQ ID NO: 4447 - DNA, 354 bp, synthetic construct
  source 1..354: mol_type = other DNA
gaggtgcagctggtggagtctgggggaggattggtggagactgggggctctctgagactctcctgtgcagcctctggacgcaccttcgggaactataccatgggctggttccgccaggctccagggagggagcgtgagtttttagcaagtattaggtggactggtggtagcacaagttatgcagactccgtgaagggccgattcaccatctccagagacaacgccaagaaggcggtgtatctgcaaatgaacagcctgaaacctgaggacacggccgtttattcctgtgtagcagcccccgccgggagagcgtttacctactggggccaggggacccaggtcaccgtctcctca

SEQ ID NO: 4448 - DNA, 354 bp, synthetic construct
  source 1..354: mol_type = other DNA
gaggtgcagctggtggagtctgggggaggattggtggagactgggggctctctgagactctcctgtgcagcctctggacgcaccttcgggaactataccatgggctggttccgccaggctccagggagggagcgtgagtttttagcaagtattaggtggactggtggtagcacaagttatgcagactccatgaagggccgattcaccatctccagagacaacgccaagaaggcggtgtatctgcaaatgaacagcctgaaacctgaggacacggccgtttattcctgtgtagcagcccccgccgggagagcgtttacctactggggccaggggacccaggtcaccgtctcctca

SEQ ID NO: 4449 - DNA, 354 bp, synthetic construct
  source 1..354: mol_type = other DNA
gaggtgcagctggtggagtctgggggaggattggtggagactgggggctctctgagactctcctgtgcagcctctggacgcaccttcgggaactataccatgggctggttccgccaggctccagggagggagcgtgagtttttagcaagtattaggtggactggtggtagcacaagttatgcagactccgtgaagggccgattcaccatctccagagacaacgccaagaaggcggtgtatctgcaaatgaacagcctgaaacctgaggacacggccgtttattcctgtgtagcagccctcaccgggagagcgtttacctactggggccaggggacccaggtcaccgtctcctca

SEQ ID NO: 4450 - DNA, 354 bp, synthetic construct
  source 1..354: mol_type = other DNA
gaggtgcagctggtggagtctgggggaggattggtggagactgggggctctctgagactctcctgtgcagcctctggacgcaccttcgggaactataccatgggctggttccgccaggctccagggagggagcgtgagtttttagcaagtattaggtggactggtggtagcacaagttatgcagactccgtgaagggccgattcaccatctccagagacaacgccaagaaggcggtgtatctgcaaatgaacagcctgaaacctgaggacacggccgtttattcctgtgtagcagcccacaccgggagagcgtttacctactggggccaggggacccaggtcactgtctcctca

SEQ ID NO: 4451 - DNA, 354 bp, synthetic construct
  source 1..354: mol_type = other DNA
gaggtgcagctggtggagtctgggggaggattggtggagactgggggctctctgagactctcctgtgcagcctctgaacgcaccttcgagagcgataccatgggctggttccgccaggctccagggagggagcgtgagtttttagcaagtattaggtggcctggtggtagcacaagttatgcaaactccgtgaagggccgattcaccatctccagagacaacgccaagaaggcggtgtatctgcaaatgaacagcctgaaacctgaggacacggccgtttattcctgtgcagcagcccccgccgggagagcgtttacctacgagggccaggggacccaggtcaccgtctcctca

SEQ ID NO: 4452 - DNA, 354 bp, synthetic construct
  source 1..354: mol_type = other DNA
gaggtgcagctggtggagtctgggggaggattggtggagactgggggctctctgagactctcctgtgcagcctctggacgcaccttcgggaaccataccatgggctggttccgccaggctccagggagggagcgtgagtttttagcaagtattaggtggactggtggtagcacaagttatgcagactccgtgaagggccgattcaccatctccagagacaacgccaagaaggcggtgtatctgcaaatgaacagcctgaaacctgaggacacggccgtttattcctgtgtagcagcctccaccgggagagcgtttacctactggggccaggggacccaggtcaccgtctcctca

SEQ ID NO: 4453 - DNA, 354 bp, synthetic construct
  source 1..354: mol_type = other DNA
gaggtgcagctggtggagtctgggggaggattggtggagactgggggctctctgagactctcctgtgcagcctctggacgcaccttcgggaactataccatgggctggttccgccaggctccagggagggagcgtgagtttttagcaagtattaggtggactggtggtagcacaagttatgcagactccgtgaagggccgattcaccatctccagagacaacgccaagaaggcggtgtatctgcgaatgaacagcctgaaacctgaggacacggccgtttattcctgtgtagcagcccccgccgggagagcgtttacctactggggccaggggacccaggtcaccgtctcctca

SEQ ID NO: 4454 - DNA, 354 bp, synthetic construct
  source 1..354: mol_type = other DNA
gaggtgcagctggtggagtctgggggaggattggtggagactgggggctctctgagactctcctgtgcagcctctggacgcaccttcgggaactataccatgggctggttccgccaggctccagggagggagcgtgagtttttagcaagtattaggtggactggtggtagcacaagttatgcagactccgtgaagggccgattcaccatctccagagacaacgccaagaaggcggtgtatctgcaaatgaacagcctgaaacctgaggacacggccgtttattcctgtgtagcagcccccacctggagagcgtttacctactggggccaggggacccaggtcaccgtctcctca

SEQ ID NO: 4455 - DNA, 354 bp, synthetic construct
  source 1..354: mol_type = other DNA
gaggtgcagctggtggagtctgggggaggattggtggagactgggggctctctgagactctcctgtgcagcctctggacgcaccttcgggaactataccatgggctggttccgccaggctccagggagggagcgtgagtttttagcaagtattaggtggactggtggtagcacaagttatgcagactccgtgaagggccgattcaccatctccagagacaacgccaagaaggcggtgtatctgcaactgaacagcctgaaacctgaggacacggccgtttattcctgtgtagcagcccccaccgtgagagcgtttacctactggggccaggggacccaggtcaccgtctcctca

SEQ ID NO: 4456 - DNA, 354 bp, synthetic construct
  source 1..354: mol_type = other DNA
gaggtgcagctggtggagtctgggggaggattggtggagactgggggctctctgagactctcctgtgcagcctctggacgcaccttcgggaactataccatgggctggttccgccaggctccagggagggagcgtgagtttttagcaagtattaggtggacaggtggtagcacaagttatgcagactccgtgaagggccgattcaccatctccagagacaacgccaagaaggcggtgtatctgcaaatggacagcctgaaacctgaggacacggccgtttattcctgtgtagcggcctccaccgggagagcgtttacctactggggccaggggacccaggtcaccgtctcctca

SEQ ID NO: 4457 - DNA, 354 bp, synthetic construct
  source 1..354: mol_type = other DNA
gaggtgcagctggtggagtctgggggaggattggtggagactgggggctctctgagactctcctgtgcagcctctggacgcaccttcgggaactataccatgggctggttccgccaggctccagggagggagcgtgagtttttagcaagtattaggtggactggtggtagcacaagttatgcagactccgtgaagggccgattcaccatctccagagacaacgccaagaaggcggtgtatctgcaaatgaacagcctgaaacctgaggacacggccgtttattcctgtgtagcagcccccatcgggagagcgtttacctactggggccaggggacccaggtcaccgtctcctca

SEQ ID NO: 4458 - DNA, 348 bp, synthetic construct
  source 1..348: mol_type = other DNA
gaggtccagcttgtcgagagtggaggcggcttggttcagcctgggggctcacttcggctgtcatgtgcggcgtctgggtcaatcttcagatttccgccgatggggtggtaccgacaggctccgggaaaacaaagagaacaggtggcgcaactgacatctggcggaagcaccaactacgcagactcagtcaaggggcggtttacgatcagtagagataacgccaagaatacctggtacctgcagatgaacagtctgaggcctgaagacacggccgtttactactgctccgtgctggggcgggacctggtaacgtattggggtcagggtacacaggtgacagtgagcagc

SEQ ID NO: 4459 - DNA, 348 bp, synthetic construct
  source 1..348: mol_type = other DNA
gaggtccagcttgtggaaagcggcggcgggcttgtccagccagggggctcactcaggctttcctgcgccgcgagtggatccatattccgctttccaccgatgggatggtacaggcaggccccagggaaacagcgagaacaagtggcacagctcacctccggagggagcactaactacgctgacagtgttaaagggcggtttaccatttcccgcgacaacgccaagaatacctggtacctgcagatgaacagcctgagaccagaggacacggcggtttattactgttctgtcttgggcagagatcgagtaacatactgggggcaagggacgcaggtgacggtgagcagc

SEQ ID NO: 4460 - DNA, 348 bp, synthetic construct
  source 1..348: mol_type = other DNA
gaggttcagctcgtcgaatcagggggagggctcgtccagcctgggggcagtttgcgcctcagttgcgccgcgagtggatcaattttcaggttccctcctatggggtggtaccggcaggctcccgggaaacagagggagcaggtggctcaactgacatcaggtgggtctacaaactatgcagattctgtcaaggggaggtttactatatccagagataatgcaaagaacacttggtacctccagatgaactccctccgcccagaggacacggctgtatactactgttccgtgttgggccgcgacatcgtgacgtattggggtcaggggacccaggtgacagtaagcagc

SEQ ID NO: 4461 - DNA, 366 bp, synthetic construct
  source 1..366: mol_type = other DNA
gaggtgcagctggtggagtctgggggaggcttggtgcagcctgggggttctctgagactctcctgtgcagcctctggattcactttagatgattatgccatgagctgggtccgacaggctccagggaaggggctggagtgggtgtccaccatttttagttacagtagtaacacatactatgcagactccgtgaagggccgattcaccatctccacagacaacgccaagaacacactgtatctgcaaatgaacagcctgaaacctgaggacacggccgtgtattactgtgcagtcggcgactttgaaggggagctggtactaaagggtgactactggggccaggggacccaggtcaccgtctcctca

SEQ ID NO: 4462 - DNA, 366 bp, synthetic construct
  source 1..366: mol_type = other DNA
gaggtgcagctggtggagtctgggggaggcttggtgcagcctgggggttctctgagactctcctgtgcagcctctggattcactttggatgattatgccatgagctgggtccggcaggctccagggaagggcctggagtgggtgtccagcatttttagttacagtactaacacatactatgcagactccgtgaagggccgattcaccatctccacagacaacgccaagaacacactgtatctgcaaatgaacagcctgaaacctgaggacacggccgtgtattactgtgcagtcggcgactttgaaggggagctggtactaaagggtgactactggggccaggggacccaggtcaccgtctcctca

SEQ ID NO: 4463 - DNA, 366 bp, synthetic construct
  source 1..366: mol_type = other DNA
gaggtgcagctggtggagtctgggggaggcttggtgcagcctgggggttctctgagactctcctgtgcagcctctggattcactttagatgattatgccatgagctgggtccgacaggctccagggaaggggctggagtgggtgtccactatttttagttacagtagtaacacatactatgcagactccgtgaagggccgattcaccatctccacagacaccgccaagaacacactgtatctgcaaatgaacagcctgaaacctgaggacacggccgtgtattactgtgcagtcggcgactttgaaggggagctggtactaaagggtgactactggggccaggggacccaggtcaccgtctcctca

SEQ ID NO: 4464 - DNA, 366 bp, synthetic construct
  source 1..366: mol_type = other DNA
gaggtgcagctggtggagtctgggggaggcttggtgcagcctgggggttctctgagactctcctgtgcagcctctggattcactttagatgattatgccatgagctgggtccgacaggctccagggaaggggctggagtgggtatccactatttttagttacagtagtaacacacactatgcagactccgtgaagggccgattcaccatctccacagacaacgccaagaacacactgtatctgcaaatgaacagcctgaaacctgaggacacggccgtgtattactgtgcagtcggcgactttgaaggggagctcgtactaaagggtgactactggggccaggggacccaggtcaccgtctcctca

SEQ ID NO: 4465 - DNA, 366 bp, synthetic construct
  source 1..366: mol_type = other DNA
gaggtgcagctggtggagtctgggggaggcttggtgcagcctgggggttctctgagactctcctgtgcagcctctggattcactttagatgattatgccatgagctgggtccgacaggctccagggaaggggctggagtgggtgtccactatttttagttacagtagtaacacatactatgcagactccgtgaagggccgattcaccatctccacagacaacgccaagaacacactgtatctgcaaatgaacagcctgaaacctgaggacacggccgtgtattactgtgcagtcggcgaccttgaaggggagctggtactaaagggtgactactggggccaggggacccaggtcaccgtctcctca

SEQ ID NO: 4466 - DNA, 366 bp, synthetic construct
  source 1..366: mol_type = other DNA
gaggtgcagctggtggagtctgggggaggcttggtgcagcctgggggttctctgagactctcctgtgcagcctctggattcactttagatgattatgccatgagctgggtccgacaggctccagggaaggggctggagtgggtgtccactatttttagttacagtagtaacacatactatgcagactccgtgaagggccgattcaccatctccacagacaacgccaagaacacactgtatctgcaaatgaacagcctgaaacctgaggacacggccgtgtattactgtgcagtcggcgactttgaaggggagctggtactagagggtgactactggggccaggggacccaggtcaccgtctcctca

SEQ ID NO: 4467 - DNA, 366 bp, synthetic construct
  source 1..366: mol_type = other DNA
gaggtgcagctggtggagtctgggggaggcttggtgcagcctgggggttctctgagactctcctgtgcagcctctggattcacttttgatgatattgccatgacctgggtccgacaggctccagggaaggggctggagtgggtgtccagtatttatagttacgggccaaacacatactatgcagactccgtgaagggccgattcaccatctccacagacagcgccaagaacacactgtatctgcaaatgaacagcctgaaacctgaggacacggccgtgtattactgtgcagtcggcgactttgaaggggagctggtactaaagggtgactactggggccaggggacccaggtcaccgtctcctca

SEQ ID NO: 4468 - DNA, 366 bp, synthetic construct
  source 1..366: mol_type = other DNA
gaggtgcagctggtggagtctgggggaggcttggtgcagcctgggggttctctgagactctcctgtgcagcctctggattcactttagatgattacgccatgagctgggtccgacaggctccagggaaggggctggagtgggtgtccactatttttagttacagtagtaacacatactatgcagactccgtgaagggccgattcaccatctccacagacaacgccaagaacacactgtatctgcaaatgaacggcctgaaacctgaggacacggctgtgtattactgtgcagtcggcgactttgaaggggagctggtactaaagggtgactactggggccaggggacccgggtcaccgtctcctca

SEQ ID NO: 4469 - DNA, 366 bp, synthetic construct
  source 1..366: mol_type = other DNA
gaggtgcagctggtggagtctgggggaggcttggtgcagcctgggggttctctgagactctcctgtgcagcctctggattcactttagatgattatgccatgagctgggtccgacaggctccaggggaggggctggagtgggtgtccactatttttagttacagtagtaacacatactatgcagactccgtgaagggccgattcaccatctccacagacaacgccaagaacacactgtatctgcaaatgaacagcctgaaacctgaggacacggccgtgtattactgtgcagtcggcgactttgaaggggagctggtactaaagggtgactactggggccaggggacccaggtcaccgtctcctca

SEQ ID NO: 4470 - DNA, 384 bp, synthetic construct
  source 1..384: mol_type = other DNA
gaggtgcagctggtggagtctgggggaggtttggtgcagcctggggggtctctgagactctcctgtgcagcctctggattcactttggattattataccataggctggttccgccaggccccagggaaggagcgtgagggggtctcatatattagtagtaacgatggtagtgtatactatgcagactccgtgaagggccgattcaccatcgagaaagacagtgccaagaacacggtgtatctgcaaatgaacagcctgaaacctgaggacacagccgtctattactgtgcagcagatctcggttttctgtacgtcgactatgtccgtcttcacacgcatcactttggttcctggggccaggggacccaggtcaccgtctcctca

SEQ ID NO: 4471 - DNA, 384 bp, synthetic construct; identical to SEQ ID NO: 4074
  source 1..384: mol_type = other DNA

SEQ ID NO: 4472 - DNA, 384 bp, synthetic construct
  source 1..384: mol_type = other DNA
gaggtgcagctggtggagtctgggggaggtttggtgcagcctggggggtctctgagactcgcctgtgcagcctctggagttagtttggattaccataccataggctggttccgccaggccccagggaaggagcgtgagggggtctcatatattagtagtcatgatggtagcatatactatgcagacttcgtgaagggtcgattcaccatcgacaaagacaacgccaagaacacggtgtatctgcaaatgaacagcctgaaacctgaggacacagccgtttattactgtgcagcagatgtcggtgttctgtacgccgactatgtccgtcttcacatgcatcattttggttcctggggccaggggacccaggtcaccgtctcctca

SEQ ID NO: 4473 - DNA, 384 bp, synthetic construct
  source 1..384: mol_type = other DNA
gaggtgcagctggtggagtctgggggaggtttggtgcagcctggggggtctctgagactctcctgtgcagcctctggagttagtttggattaccataccataggctggttccgccaggccccagggaaggagcgtgagggggtctcatatattaatagtaatgatggtaccacatactatgcagacttcgtgaagggccgattcaccatcgacaaagacaacgccaagaacacggtgtatctgcaaatgaacgacctgaaacctgaggacacagccgtttattactgtgcagcagatctcggtgttctgtacaccgactatgtccgtcttcacatgcatcattttggttcctggggccaggggacccaggtcaccgtctcctca

SEQ ID NO: 4474 - DNA, 384 bp, synthetic construct
  source 1..384: mol_type = other DNA
gaggtgcagctggtggagtctgggggaggtttggtgcagcctggggggtctctgagactctcctgtgcagcctctggattcactttggatgattataccatcggctggttccgccaggccccagggaaggagcgtgagggggtctcatatattgatagattcgatggtagtgtatactatgcagactccgtgaagggccgattcaccatcgagaaagacagtgccaagaacacggtgtatctgcaaatgaacagcctgaaacctgaggacacagccgtctattactgtgcagcagatctcggttttctgtacgtcgactatgtccgtcttcacacgcatcactttggttcctggggccaggggacccaggtcaccgtctcctca

SEQ ID NO: 4475 - DNA, 384 bp, synthetic construct
  source 1..384: mol_type = other DNA
gaggtgcagctggtggagtctgggggaggtttggtgcagcctggggggtctctgagactctcctgtgcagcctctggagttagtttggattaccataccataggctggttccgccaggccccagggaaggagcgtgagggggtctcatatattagtagtaatgatggtagtacatactatgcagacttcgtgaagggccgattcaccatcgacaaagacaacgccaagaacacggtgtatctgcaaatgaacagcctgaaacctgaggacacagccgtttattactgtgcagcagatgtcggtgttctgtacgccgactatgtccgtcttcacacgcatcattttggttcctggggccaggggacccaggtcaccgtctcctca

SEQ ID NO: 4476 - DNA, 384 bp, synthetic construct
  source 1..384: mol_type = other DNA
gaggtgcagctggtggagtctgggggaggtttggtgcagcctggggggtctctgagactctcctgtgcagcctctggagttagtttggattaccataccataggctggttccgccaggccccagggaaggagcgtgagggggtctcatatattagtagtaatgatggtagtacatactatgcagacttcgtgaagggccgattcaccatcgacaaagacaacgccaagaacacggtgtatctgcaaatgaacagcctggaacctgaggacacagccgtttattactgtgcagcagatgtcggtgttctgtacgccgactatgtccgtcttcacacgcatcattttggttcctggggccaggggacccaggtcaccgtctcctca

SEQ ID NO: 4477 - DNA, 384 bp, synthetic construct
  source 1..384: mol_type = other DNA
gaggtgcagctggtggagtctgggggaggtttggtgcagcctggggggtctctgagactctcctgtgcagcctctggagttagtttggattaccataccataggctggttccgccaggccccagggaaggagcgtgagggggtctcatatattagtagtattgatggtagtacatactatgcagacttcgtgaagggccgattcaccatcgacaaagacaacgccaagaacacggtgtatctgcaaatgaacagcctgaaacctgaggacacagccgtttattactgtgcagcggatgtcggtgttctgtacgccgactatgtccgtcttcacatgcatcattttggttcctggggccgggggacccaggtcaccgtctcctca

SEQ ID NO: 4478 - DNA, 384 bp, synthetic construct
  source 1..384: mol_type = other DNA
gaggtgcagctggtggagtctgggggaggattggtgcaggctgggggctctctgagactctcctgtgcagcctctggagttagtttggattaccataccataggctggttccgccaggccccagggaaggagcgtgagggggtctcatatattaatagtaatgatggtaccacatactatgcagacttcgtgaagggccgattcaccatcgacaaagacaacgccaagaacacggtgtatctgcaaatgaacgacctgaaacctgaggacacagccgtttattactgtgcagcagatctcggtgttctgtacaccgactatgtccgtcttcacatgcatcattttggttcctggggccaggggacccaggtcaccgtctcctca

SEQ ID NO: 4479 - DNA, 384 bp, synthetic construct
  source 1..384: mol_type = other DNA
gaggtgcagctggtggagtctgggggaggattggtgcagcctggggagtctctgagactctcctgtgcagcctctggagttagtttggattaccataccataggctggttccgccaggccccagggaaggagcgtgagggggtctcatatattaatagtaatgatggtaccacatactatgcagacttcgtgaagggccgattcaccatcgacaaagacaacgccaagaacacggtgtatctgcaaatgaacgacctgaaacctgaggacacagccgtttattactgtgcagcagatctcggtgttctgtacaccgactatgtccgtcttcacatgcatcattttggttcctggggccaggggacccaggtcaccgtctcctca

SEQ ID NO: 4480 - DNA, 384 bp, synthetic construct
  source 1..384: mol_type = other DNA
gaggtgcagctggtggagtctgggggaggtttggtgcagcctggggggtctctgagactctcctgtgcagcctctggattcactttgggtgattataccataggctggttccgccaggccccagggaaggagcgtgagggggtctcatatattagtcatgatgatggtagcacatactatgcggacttcgtgaagggccgattctccatcgacaaagacaacgccaagaacacggtgcatctctacatgaacagcctgaaacctgacgacacagccgtttattactgtgcagcagatctcgggtttctgtacgccgactatgtccgtctttacacgcatcattttggttcctggggccaggggacccaggtcaccgtctcctca

SEQ ID NO: 4481 - DNA, 384 bp, synthetic construct
  source 1..384: mol_type = other DNA
gaggtgcagctggtggagtctgggggaggtttggtgcagcctggggggtctctgagactctcctgtgcagcctctggagttagtttggattaccataccataggctggttccgccaggccccagggaaggagcgtgagggggtctcatatattagtagtaatgatggtagcacatactatgcagacttcgtgaagggccgattcaccatcgacaaagacaacgccaagaacacggtgtatttgcaaatgaacagcctgaaacctgaggacacagccgtttattactgtgcagcagatgtcggtgttctgtacgccgactatgtcccgcttcacatgcatcattttggttcctggggccaggggacccaggtcaccgtctcctca

SEQ ID NO: 4482 - DNA, 384 bp, synthetic construct
  source 1..384: mol_type = other DNA
gaggtgcagctggtggagtctgggggagacttggtacagcctggggggtctctgagactctcctgtttagcctctggattctcttttgatcattatgccataggctggttccgccagaccccagggaaggagcgtgagggggtctcatatattagtaataacgatggtagtgtatactatgcagactccgtgaagggccgattcaccatcgagaaagacagtgccaagaacacggtgtatctgcaaatgaacaacctgaaacctgaggacacagccgtctattactgtgcagcagatctcggttttctgtacgtcgactatgtcccgcttcacacgcatcactttggttcctggggccaggggacccaggtcaccgtctcctca

SEQ ID NO: 4483 - protein, 485 aa, synthetic construct
EVQLLESGGGLVQPGGSLRLSCAASGRTFSDYGMGWFRQAPGKDSEFVAAINWSNGRTNYADSVKGRFTISRDNAKNTGYLQMNSLRVEDTAVYYCAATPSGKAYSYWGQGTQVTVSSGGGGSGGGGSGGGGSEVQLLESGGGLVQPGGSLRLSCAASGRTFSDYGMGWFRQAPGKDSEFVAAINWSNGRTNYADSVKGRFTISRDNAKNTGYLQMNSLRVEDTAVYYCAATPSGKAYSYWGQGTQVTVSSGGGGSESKYGPPCPPCPAPEFEGGPSVFLFPPKPKDTLMISRTPEVTCVVVDVSQEDPEVQFNWYVDGVEVHNAKTKPREEQFNSTYRVVSVLTVLHQDWLNGKEYKCKVSNKGLPSSIEKTISKAKGQPREPQVYTLPPSQEEMTKNQVSLTCLVKGFYPSDIAVEWESNGQPENNYKTTPPVLDSDGSFFLYSRLTVDKSRWQEGNVFSCSVMHEALHNHYTQKSLSLSLGK

SEQ ID NO: 4484 - protein, 482 aa, synthetic construct
EVQLLESGGGLVQPGGSLRLSCAASGRTFSDYGMGWFRQAPGKDSEFVAAINWSNGRTNYADSVKGRFTISRDNAKNTGYLQMNSLRVEDTAVYYCAATPSGKAYSYWGQGTQVTVSSGGGGSGGGGSGGGGSEVQLLESGGGLVQPGGSLRLSCAASGRTFSDYGMGWFRQAPGKDSEFVAAINWSNGRTNYADSVKGRFTISRDNAKNTGYLQMNSLRVEDTAVYYCAATPSGKAYSYWGQGTQVTVSSGGGGSDKTHTCPPCPAPEAAGGPSVFLFPPKPKDTLMISRTPEVTCVVVDVSHEDPEVKFNWYVDGVEVHNAKTKPREEQYNSTYRVVSVLTVLHQDWLNGKEYKCKVSNKALAAPIEKTISKAKGQPREPQVYTLPPSREEMTKNQVSLTCLVKGFYPSDIAVEWESNGQPENNYKTTPPVLDSDGSFFLYSKLTVDKSRWQQGNVFSCSVMHEALHNHYTQKSLSLSPG

SEQ ID NO: 4485 - protein, 482 aa, synthetic construct
EVQLLESGGGLVQPGGSLRLSCAASGRTFSDYGMGWFRQAPGKDSEFVAAINWSNGRTNYADSVKGRFTISRDNAKNTGYLQMNSLRVEDTAVYYCATTPSGKAYSYWGQGTQVTVSSGGGGSGGGGSGGGGSEVQLLESGGGLVQPGGSLRLSCAASGRTFSDYGMGWFRQAPGKDSEFVAAINWSNGRTNYADSVKGRFTISRDNAKNTGYLQMNSLRVEDTAVYYCATTPSGKAYSYWGQGTQVTVSSGGGGSDKTHTCPPCPAPEAAGGPSVFLFPPKPKDTLMISRTPEVTCVVVDVSHEDPEVKFNWYVDGVEVHNAKTKPREEQYNSTYRVVSVLTVLHQDWLNGKEYKCKVSNKALAAPIEKTISKAKGQPREPQVYTLPPSREEMTKNQVSLTCLVKGFYPSDIAVEWESNGQPENNYKTTPPVLDSDGSFFLYSKLTVDKSRWQQGNVFSCSVMHEALHNHYTQKSLSLSPG

SEQ ID NO: 4486 - protein, 485 aa, synthetic construct
EVQLLESGGGLVQPGGSLRLSCAASGRTFGSYTMGWFRQAPGKEREFLASIRWTGGSTSYADSVKGRFTISRDDAKKTVYLQMNSLRPEDTAVYYCVASPTGRAFTYWGQGTQVTVSSGGGGSGGGGSGGGGSEVQLLESGGGLVQPGGSLRLSCAASGRTFGSYTMGWFRQAPGKEREFLASIRWTGGSTSYADSVKGRFTISRDDAKKTVYLQMNSLRPEDTAVYYCVASPTGRAFTYWGQGTQVTVSSGGGGSESKYGPPCPPCPAPEFEGGPSVFLFPPKPKDTLMISRTPEVTCVVVDVSQEDPEVQFNWYVDGVEVHNAKTKPREEQFNSTYRVVSVLTVLHQDWLNGKEYKCKVSNKGLPSSIEKTISKAKGQPREPQVYTLPPSQEEMTKNQVSLTCLVKGFYPSDIAVEWESNGQPENNYKTTPPVLDSDGSFFLYSRLTVDKSRWQEGNVFSCSVMHEALHNHYTQKSLSLSLGK

SEQ ID NO: 4487 - protein, 483 aa, synthetic construct
EVQLLESGGGLVQPGGSLRLSCAASGRTFGSYTMGWFRQAPGKEREFLASIRWTGGSTSYADSVKGRFTISRDDAKKTVYLQMNSLRPEDTAVYYCVASPTGRAFTYWGQGTQVTVSSGGGGSGGGGSGGGGSEVQLLESGGGLVQPGGSLRLSCAASGRTFGSYTMGWFRQAPGKEREFLASIRWTGGSTSYADSVKGRFTISRDDAKKTVYLQMNSLRPEDTAVYYCVASPTGRAFTYWGQGTQVTVSSGGGGSDKTHTCPPCPAPEAAGGPSVFLFPPKPKDTLMISRTPEVTCVVVDVSHEDPEVKFNWYVDGVEVHNAKTKPREEQYNSTYRVVSVLTVLHQDWLNGKEYKCKVSNKALAAPIEKTISKAKGQPREPQVYTLPPSREEMTKNQVSLTCLVKGFYPSDIAVEWESNGQPENNYKTTPPVLDSDGSFFLYSKLTVDKSRWQQGNVFSCSVMHEALHNHYTQKSLSLSPGK

SEQ ID NO: 4488 - protein, 485 aa, synthetic construct
EVQLLESGGGLVQPGGSLRLSCAASGRTFSDYGMGWFRQAPGKDSEFVAAINWSNGKTNYADSVKGRFTISRDNAKNTGYLQMNSLRVEDTAVYYCAATPSGKAYSYWGQGTQVTVSSGGGGSGGGGSGGGGSEVQLLESGGGLVQPGGSLRLSCAASGRTFSDYGMGWFRQAPGKDSEFVAAINWSNGKTNYADSVKGRFTISRDNAKNTGYLQMNSLRVEDTAVYYCAATPSGKAYSYWGQGTQVTVSSGGGGSESKYGPPCPPCPAPEFEGGPSVFLFPPKPKDTLMISRTPEVTCVVVDVSQEDPEVQFNWYVDGVEVHNAKTKPREEQFNSTYRVVSVLTVLHQDWLNGKEYKCKVSNKGLPSSIEKTISKAKGQPREPQVYTLPPSQEEMTKNQVSLTCLVKGFYPSDIAVEWESNGQPENNYKTTPPVLDSDGSFFLYSRLTVDKSRWQEGNVFSCSVMHEALHNHYTQKSLSLSLGK

SEQ ID NO: 4489 - protein, 495 aa, synthetic construct
EVQLLESGGGLVQPGGSLRLSCAASGFTFDDIAMTWVRQAPGKGLEWVSSIYSYGPNTYYADSVKGRFTISTDSAKNTLYLQMNSLRPEDTAVYYCAADSDLSTVTVGPHDYWGQGTQVTVSSGGGGSGGGGSGGGGSEVQLLESGGGLVQPGGSLRLSCAASGFTFDDIAMTWVRQAPGKGLEWVSSIYSYGPNTYYADSVKGRFTISTDSAKNTLYLQMNSLRPEDTAVYYCAADSDLSTVTVGPHDYWGQGTQVTVSSGGGGSESKYGPPCPPCPAPEFEGGPSVFLFPPKPKDTLMISRTPEVTCVVVDVSQEDPEVQFNWYVDGVEVHNAKTKPREEQFNSTYRVVSVLTVLHQDWLNGKEYKCKVSNKGLPSSIEKTISKAKGQPREPQVYTLPPSQEEMTKNQVSLTCLVKGFYPSDIAVEWESNGQPENNYKTTPPVLDSDGSFFLYSRLTVDKSRWQEGNVFSCSVMHEALHNHYTQKSLSLSLGK

SEQ ID NO: 4490 - protein, 485 aa, synthetic construct
EVQLLESGGGLVQPGGSLRLSCAASGRTFSDYGMGWFRQAPGKDSEFVAAINWSNARTNYADSVKGRFTISRDNAKNTGYLQMNSLRVEDTAVYYCAATPSGKAYSYWGQGTQVTVSSGGGGSGGGGSGGGGSEVQLLESGGGLVQPGGSLRLSCAASGRTFSDYGMGWFRQAPGKDSEFVAAINWSNARTNYADSVKGRFTISRDNAKNTGYLQMNSLRVEDTAVYYCAATPSGKAYSYWGQGTQVTVSSGGGGSESKYGPPCPPCPAPEFEGGPSVFLFPPKPKDTLMISRTPEVTCVVVDVSQEDPEVQFNWYVDGVEVHNAKTKPREEQFNSTYRVVSVLTVLHQDWLNGKEYKCKVSNKGLPSSIEKTISKAKGQPREPQVYTLPPSQEEMTKNQVSLTCLVKGFYPSDIAVEWESNGQPENNYKTTPPVLDSDGSFFLYSRLTVDKSRWQEGNVFSCSVMHEALHNHYTQKSLSLSLGK

SEQ ID NO: 4491 - protein, 485 aa, synthetic construct
EVQLLESGGGLVQPGGSLRLSCAASGRTFSDYGMGWFRQAPGKDSEFVAAINWSNARTNYADSVKGRFTISRDNAKNTGYLQMNSLRVEDTAVYYCAATPSGKAYSYWGQGTQVTVPAGGGGSGGGGSGGGGSEVQLLESGGGLVQPGGSLRLSCAASGRTFSDYGMGWFRQAPGKDSEFVAAINWSNARTNYADSVKGRFTISRDNAKNTGYLQMNSLRVEDTAVYYCAATPSGKAYSYWGQGTQVTVPAGGGGSESKYGPPCPPCPAPEFEGGPSVFLFPPKPKDTLMISRTPEVTCVVVDVSQEDPEVQFNWYVDGVEVHNAKTKPREEQFNSTYRVVSVLTVLHQDWLNGKEYKCKVSNKGLPSSIEKTISKAKGQPREPQVYTLPPSQEEMTKNQVSLTCLVKGFYPSDIAVEWESNGQPENNYKTTPPVLDSDGSFFLYSRLTVDKSRWQEGNVFSCSVMHEALHNHYTQKSLSLSLGK

SEQ ID NO: 4492 - protein, 483 aa, synthetic construct
EVQLLESGGGLVQPGGSLRLSCAASGRTFSDYGMGWFRQAPGKDSEFVAAINWSNARTNYADSVKGRFTISRDNAKNTGYLQMNSLRVEDTAVYYCAATPSGKAYSYWGQGTQVTVPAGGGGSGGGGSGGGGSEVQLLESGGGLVQPGGSLRLSCAASGRTFSDYGMGWFRQAPGKDSEFVAAINWSNARTNYADSVKGRFTISRDNAKNTGYLQMNSLRVEDTAVYYCAATPSGKAYSYWGQGTQVTVPAGGGGSDKTHTCPPCPAPEAAGGPSVFLFPPKPKDTLMISRTPEVTCVVVDVSHEDPEVKFNWYVDGVEVHNAKTKPREEQYNSTYRVVSVLTVLHQDWLNGKEYKCKVSNKALAAPIEKTISKAKGQPREPQVYTLPPSREEMTKNQVSLTCLVKGFYPSDIAVEWESNGQPENNYKTTPPVLDSDGSFFLYSKLTVDKSRWQQGNVFSCSVMHEALHNHYTQKSLSLSPGK

SEQ ID NO: 4493 - protein, 483 aa, synthetic construct
DVQLLESGGGLVQPGGSLRLSCAASGRTFGSYTMGWFRQAPGKEREFLASIRWTGGSTSYADSVKGRFTISRDDAKKTVYLQMNSLRPEDTAVYYCVASPTGRAFTYWGQGTQVTVPAGGGGSGGGGSGGGGSDVQLLESGGGLVQPGGSLRLSCAASGRTFGSYTMGWFRQAPGKEREFLASIRWTGGSTSYADSVKGRFTISRDDAKKTVYLQMNSLRPEDTAVYYCVASPTGRAFTYWGQGTQVTVPAGGGGSDKTHTCPPCPAPEAAGGPSVFLFPPKPKDTLMISRTPEVTCVVVDVSHEDPEVKFNWYVDGVEVHNAKTKPREEQYNSTYRVVSVLTVLHQDWLNGKEYKCKVSNKALAAPIEKTISKAKGQPREPQVYTLPPSREEMTKNQVSLTCLVKGFYPSDIAVEWESNGQPENNYKTTPPVLDSDGSFFLYSKLTVDKSRWQQGNVFSCSVMHEALHNHYTQKSLSLSPGK

SEQ ID NO: 4494 - protein, 485 aa, synthetic construct
DVQLLESGGGLVQPGGSLRLSCAASGRTFGSYTMGWFRQAPGKEREFLASIRWTGGSTSYADSVKGRFTISRDDAKKTVYLQMNSLRPEDTAVYYCVASPTGRAFTYWGQGTQVTVPAGGGGSGGGGSGGGGSDVQLLESGGGLVQPGGSLRLSCAASGRTFGSYTMGWFRQAPGKEREFLASIRWTGGSTSYADSVKGRFTISRDDAKKTVYLQMNSLRPEDTAVYYCVASPTGRAFTYWGQGTQVTVPAGGGGSESKYGPPCPPCPAPEFEGGPSVFLFPPKPKDTLMISRTPEVTCVVVDVSQEDPEVQFNWYVDGVEVHNAKTKPREEQFNSTYRVVSVLTVLHQDWLNGKEYKCKVSNKGLPSSIEKTISKAKGQPREPQVYTLPPSQEEMTKNQVSLTCLVKGFYPSDIAVEWESNGQPENNYKTTPPVLDSDGSFFLYSRLTVDKSRWQEGNVFSCSVMHEALHNHYTQKSLSLSLGK

SEQ ID NO: 4495 - protein, 483 aa, synthetic construct
DVQLLESGGGLVQPGGSLRLSCAASGRTFSDYGMGWFRQAPGKDSEFVAAINWSNARTNYADSVKGRFTISRDNAKNTGYLQMNSLRVEDTAVYYCAATPSGKAYSYWGQGTQVTVPAGGGGSGGGGSGGGGSDVQLLESGGGLVQPGGSLRLSCAASGRTFSDYGMGWFRQAPGKDSEFVAAINWSNARTNYADSVKGRFTISRDNAKNTGYLQMNSLRVEDTAVYYCAATPSGKAYSYWGQGTQVTVPAGGGGSDKTHTCPPCPAPEAAGGPSVFLFPPKPKDTLMISRTPEVTCVVVDVSHEDPEVKFNWYVDGVEVHNAKTKPREEQYNSTYRVVSVLTVLHQDWLNGKEYKCKVSNKALAAPIEKTISKAKGQPREPQVYTLPPSREEMTKNQVSLTCLVKGFYPSDIAVEWESNGQPENNYKTTPPVLDSDGSFFLYSKLTVDKSRWQQGNVFSCSVMHEALHNHYTQKSLSLSPGK

SEQ ID NO: 4496 - protein, 485 aa, synthetic construct
DVQLLESGGGLVQPGGSLRLSCAASGRTFSDYGMGWFRQAPGKDSEFVAAINWSNARTNYADSVKGRFTISRDNAKNTGYLQMNSLRVEDTAVYYCAATPSGKAYSYWGQGTQVTVPAGGGGSGGGGSGGGGSDVQLLESGGGLVQPGGSLRLSCAASGRTFSDYGMGWFRQAPGKDSEFVAAINWSNARTNYADSVKGRFTISRDNAKNTGYLQMNSLRVEDTAVYYCAATPSGKAYSYWGQGTQVTVPAGGGGSESKYGPPCPPCPAPEFEGGPSVFLFPPKPKDTLMISRTPEVTCVVVDVSQEDPEVQFNWYVDGVEVHNAKTKPREEQFNSTYRVVSVLTVLHQDWLNGKEYKCKVSNKGLPSSIEKTISKAKGQPREPQVYTLPPSQEEMTKNQVSLTCLVKGFYPSDIAVEWESNGQPENNYKTTPPVLDSDGSFFLYSRLTVDKSRWQEGNVFSCSVMHEALHNHYTQKSLSLSLGK

SEQ ID NO: 4497 - protein, 493 aa, synthetic construct
EVQLLESGGGLVQPGGSLRLSCAASGFTFDDIAMTWVRQAPGKGLEWVSSIYSYGPNTYYADSVKGRFTISTDSAKNTLYLQMNSLRPEDTAVYYCAADSDLSTVTVGPHDYWGQGTQVTVSSGGGGSGGGGSGGGGSEVQLLESGGGLVQPGGSLRLSCAASGFTFDDIAMTWVRQAPGKGLEWVSSIYSYGPNTYYADSVKGRFTISTDSAKNTLYLQMNSLRPEDTAVYYCAADSDLSTVTVGPHDYWGQGTQVTVSSGGGGSDKTHTCPPCPAPEAAGGPSVFLFPPKPKDTLMISRTPEVTCVVVDVSHEDPEVKFNWYVDGVEVHNAKTKPREEQYNSTYRVVSVLTVLHQDWLNGKEYKCKVSNKALAAPIEKTISKAKGQPREPQVYTLPPSREEMTKNQVSLTCLVKGFYPSDIAVEWESNGQPENNYKTTPPVLDSDGSFFLYSKLTVDKSRWQQGNVFSCSVMHEALHNHYTQKSLSLSPGK

SEQ ID NO: 4498 - protein, 483 aa, synthetic construct
EVQLLESGGGLVQPGGSLRLSCAASGRTFSDYGMGWFRQAPGKDSEFVAAINWSNARTNYADSVKGRFTISRDNAKNTGYLQMNSLRVEDTAVYYCAATPSGKAYSYWGQGTQVTVSSGGGGSGGGGSGGGGSEVQLLESGGGLVQPGGSLRLSCAASGRTFSDYGMGWFRQAPGKDSEFVAAINWSNARTNYADSVKGRFTISRDNAKNTGYLQMNSLRVEDTAVYYCAATPSGKAYSYWGQGTQVTVSSGGGGSDKTHTCPPCPAPEAAGGPSVFLFPPKPKDTLMISRTPEVTCVVVDVSHEDPEVKFNWYVDGVEVHNAKTKPREEQYNSTYRVVSVLTVLHQDWLNGKEYKCKVSNKALAAPIEKTISKAKGQPREPQVYTLPPSREEMTKNQVSLTCLVKGFYPSDIAVEWESNGQPENNYKTTPPVLDSDGSFFLYSKLTVDKSRWQQGNVFSCSVMHEALHNHYTQKSLSLSPGK

SEQ ID NO: 4499 - protein, 485 aa, synthetic construct
DVQLLESGGGLVQPGGSLRLSCAASGRTFGSYTMGWFRQAPGKEREFLASIRWTGGSTSYADSVKGRFTISRDDAKKTVYLQMNSLRPEDTAVYYCVASPTGRAFTYWGQGTQVTVSSGGGGSGGGGSGGGGSDVQLLESGGGLVQPGGSLRLSCAASGRTFGSYTMGWFRQAPGKEREFLASIRWTGGSTSYADSVKGRFTISRDDAKKTVYLQMNSLRPEDTAVYYCVASPTGRAFTYWGQGTQVTVSSGGGGSESKYGPPCPPCPAPEFEGGPSVFLFPPKPKDTLMISRTPEVTCVVVDVSQEDPEVQFNWYVDGVEVHNAKTKPREEQFNSTYRVVSVLTVLHQDWLNGKEYKCKVSNKGLPSSIEKTISKAKGQPREPQVYTLPPSQEEMTKNQVSLTCLVKGFYPSDIAVEWESNGQPENNYKTTPPVLDSDGSFFLYSRLTVDKSRWQEGNVFSCSVMHEALHNHYTQKSLSLSLGK

SEQ ID NO: 4500 - protein, 495 aa, synthetic construct
DVQLLESGGGLVQPGGSLRLSCAASGFTFDDIAMTWVRQAPGKGLEWVSSIYSYGPNTYYADSVKGRFTISTDSAKNTLYLQMNSLRPEDTAVYYCAADSDLSTVTVGPHDYWGQGTQVTVSSGGGGSGGGGSGGGGSDVQLLESGGGLVQPGGSLRLSCAASGFTFDDIAMTWVRQAPGKGLEWVSSIYSYGPNTYYADSVKGRFTISTDSAKNTLYLQMNSLRPEDTAVYYCAADSDLSTVTVGPHDYWGQGTQVTVSSGGGGSESKYGPPCPPCPAPEFEGGPSVFLFPPKPKDTLMISRTPEVTCVVVDVSQEDPEVQFNWYVDGVEVHNAKTKPREEQFNSTYRVVSVLTVLHQDWLNGKEYKCKVSNKGLPSSIEKTISKAKGQPREPQVYTLPPSQEEMTKNQVSLTCLVKGFYPSDIAVEWESNGQPENNYKTTPPVLDSDGSFFLYSRLTVDKSRWQEGNVFSCSVMHEALHNHYTQKSLSLSLGK

SEQ ID NO: 4501 - protein, 485 aa, synthetic construct
DVQLLESGGGLVQPGGSLRLSCAASGRTFSDYGMGWFRQAPGKDSEFVAAINWSNARTNYADSVKGRFTISRDNAKNTGYLQMNSLRVEDTAVYYCAATPSGKAYSYWGQGTQVTVSSGGGGSGGGGSGGGGSDVQLLESGGGLVQPGGSLRLSCAASGRTFSDYGMGWFRQAPGKDSEFVAAINWSNARTNYADSVKGRFTISRDNAKNTGYLQMNSLRVEDTAVYYCAATPSGKAYSYWGQGTQVTVSSGGGGSESKYGPPCPPCPAPEFEGGPSVFLFPPKPKDTLMISRTPEVTCVVVDVSQEDPEVQFNWYVDGVEVHNAKTKPREEQFNSTYRVVSVLTVLHQDWLNGKEYKCKVSNKGLPSSIEKTISKAKGQPREPQVYTLPPSQEEMTKNQVSLTCLVKGFYPSDIAVEWESNGQPENNYKTTPPVLDSDGSFFLYSRLTVDKSRWQEGNVFSCSVMHEALHNHYTQKSLSLSLGK

SEQ ID NO: 4502 - protein, 483 aa, synthetic construct
DVQLLESGGGLVQPGGSLRLSCAASGRTFGSYTMGWFRQAPGKEREFLASIRWTGGSTSYADSVKGRFTISRDDAKKTVYLQMNSLRPEDTAVYYCVASPTGRAFTYWGQGTQVTVSSGGGGSGGGGSGGGGSDVQLLESGGGLVQPGGSLRLSCAASGRTFGSYTMGWFRQAPGKEREFLASIRWTGGSTSYADSVKGRFTISRDDAKKTVYLQMNSLRPEDTAVYYCVASPTGRAFTYWGQGTQVTVSSGGGGSDKTHTCPPCPAPEAAGGPSVFLFPPKPKDTLMISRTPEVTCVVVDVSHEDPEVKFNWYVDGVEVHNAKTKPREEQYNSTYRVVSVLTVLHQDWLNGKEYKCKVSNKALAAPIEKTISKAKGQPREPQVYTLPPSREEMTKNQVSLTCLVKGFYPSDIAVEWESNGQPENNYKTTPPVLDSDGSFFLYSKLTVDKSRWQQGNVFSCSVMHEALHNHYTQKSLSLSPGK

SEQ ID NO: 4503 - protein, 493 aa, synthetic construct
DVQLLESGGGLVQPGGSLRLSCAASGFTFDDIAMTWVRQAPGKGLEWVSSIYSYGPNTYYADSVKGRFTISTDSAKNTLYLQMNSLRPEDTAVYYCAADSDLSTVTVGPHDYWGQGTQVTVSSGGGGSGGGGSGGGGSDVQLLESGGGLVQPGGSLRLSCAASGFTFDDIAMTWVRQAPGKGLEWVSSIYSYGPNTYYADSVKGRFTISTDSAKNTLYLQMNSLRPEDTAVYYCAADSDLSTVTVGPHDYWGQGTQVTVSSGGGGSDKTHTCPPCPAPEAAGGPSVFLFPPKPKDTLMISRTPEVTCVVVDVSHEDPEVKFNWYVDGVEVHNAKTKPREEQYNSTYRVVSVLTVLHQDWLNGKEYKCKVSNKALAAPIEKTISKAKGQPREPQVYTLPPSREEMTKNQVSLTCLVKGFYPSDIAVEWESNGQPENNYKTTPPVLDSDGSFFLYSKLTVDKSRWQQGNVFSCSVMHEALHNHYTQKSLSLSPGK

SEQ ID NO: 4504 - protein, 483 aa, synthetic construct
DVQLLESGGGLVQPGGSLRLSCAASGRTFSDYGMGWFRQAPGKDSEFVAAINWSNARTNYADSVKGRFTISRDNAKNTGYLQMNSLRVEDTAVYYCAATPSGKAYSYWGQGTQVTVSSGGGGSGGGGSGGGGSDVQLLESGGGLVQPGGSLRLSCAASGRTFSDYGMGWFRQAPGKDSEFVAAINWSNARTNYADSVKGRFTISRDNAKNTGYLQMNSLRVEDTAVYYCAATPSGKAYSYWGQGTQVTVSSGGGGSDKTHTCPPCPAPEAAGGPSVFLFPPKPKDTLMISRTPEVTCVVVDVSHEDPEVKFNWYVDGVEVHNAKTKPREEQYNSTYRVVSVLTVLHQDWLNGKEYKCKVSNKALAAPIEKTISKAKGQPREPQVYTLPPSREEMTKNQVSLTCLVKGFYPSDIAVEWESNGQPENNYKTTPPVLDSDGSFFLYSKLTVDKSRWQQGNVFSCSVMHEALHNHYTQKSLSLSPGK

SEQ ID NO: 4505 - protein, 485 aa, synthetic construct
EVQLLESGGGLVQPGGSLRLSCAASGRTFGSYTMGWFRQAPGKEREFLASIRWTGGSTSYADSVKGRFTISRDDAKKTVYLQMNSLRPEDTAVYYCVASPTGRAFTYWGQGTQVTVPAGGGGSGGGGSGGGGSEVQLLESGGGLVQPGGSLRLSCAASGRTFGSYTMGWFRQAPGKEREFLASIRWTGGSTSYADSVKGRFTISRDDAKKTVYLQMNSLRPEDTAVYYCVASPTGRAFTYWGQGTQVTVPAGGGGSESKYGPPCPPCPAPEFEGGPSVFLFPPKPKDTLMISRTPEVTCVVVDVSQEDPEVQFNWYVDGVEVHNAKTKPREEQFNSTYRVVSVLTVLHQDWLNGKEYKCKVSNKGLPSSIEKTISKAKGQPREPQVYTLPPSQEEMTKNQVSLTCLVKGFYPSDIAVEWESNGQPENNYKTTPPVLDSDGSFFLYSRLTVDKSRWQEGNVFSCSVMHEALHNHYTQKSLSLSLGK

SEQ ID NO: 4506 - protein, 495 aa, synthetic construct
EVQLLESGGGLVQPGGSLRLSCAASGFTFDDIAMTWVRQAPGKGLEWVSSIYSYGPNTYYADSVKGRFTISTDSAKNTLYLQMNSLRPEDTAVYYCAADSDLSTVTVGPHDYWGQGTQVTVPAGGGGSGGGGSGGGGSEVQLLESGGGLVQPGGSLRLSCAASGFTFDDIAMTWVRQAPGKGLEWVSSIYSYGPNTYYADSVKGRFTISTDSAKNTLYLQMNSLRPEDTAVYYCAADSDLSTVTVGPHDYWGQGTQVTVPAGGGGSESKYGPPCPPCPAPEFEGGPSVFLFPPKPKDTLMISRTPEVTCVVVDVSQEDPEVQFNWYVDGVEVHNAKTKPREEQFNSTYRVVSVLTVLHQDWLNGKEYKCKVSNKGLPSSIEKTISKAKGQPREPQVYTLPPSQEEMTKNQVSLTCLVKGFYPSDIAVEWESNGQPENNYKTTPPVLDSDGSFFLYSRLTVDKSRWQEGNVFSCSVMHEALHNHYTQKSLSLSLGK

SEQ ID NO: 4507 - protein, 483 aa, synthetic construct
EVQLLESGGGLVQPGGSLRLSCAASGRTFGSYTMGWFRQAPGKEREFLASIRWTGGSTSYADSVKGRFTISRDDAKKTVYLQMNSLRPEDTAVYYCVASPTGRAFTYWGQGTQVTVPAGGGGSGGGGSGGGGSEVQLLESGGGLVQPGGSLRLSCAASGRTFGSYTMGWFRQAPGKEREFLASIRWTGGSTSYADSVKGRFTISRDDAKKTVYLQMNSLRPEDTAVYYCVASPTGRAFTYWGQGTQVTVPAGGGGSDKTHTCPPCPAPEAAGGPSVFLFPPKPKDTLMISRTPEVTCVVVDVSHEDPEVKFNWYVDGVEVHNAKTKPREEQYNSTYRVVSVLTVLHQDWLNGKEYKCKVSNKALAAPIEKTISKAKGQPREPQVYTLPPSREEMTKNQVSLTCLVKGFYPSDIAVEWESNGQPENNYKTTPPVLDSDGSFFLYSKLTVDKSRWQQGNVFSCSVMHEALHNHYTQKSLSLSPGK

SEQ ID NO: 4508 - protein, 493 aa, synthetic construct
EVQLLESGGGLVQPGGSLRLSCAASGFTFDDIAMTWVRQAPGKGLEWVSSIYSYGPNTYYADSVKGRFTISTDSAKNTLYLQMNSLRPEDTAVYYCAADSDLSTVTVGPHDYWGQGTQVTVPAGGGGSGGGGSGGGGSEVQLLESGGGLVQPGGSLRLSCAASGFTFDDIAMTWVRQAPGKGLEWVSSIYSYGPNTYYADSVKGRFTISTDSAKNTLYLQMNSLRPEDTAVYYCAADSDLSTVTVGPHDYWGQGTQVTVPAGGGGSDKTHTCPPCPAPEAAGGPSVFLFPPKPKDTLMISRTPEVTCVVVDVSHEDPEVKFNWYVDGVEVHNAKTKPREEQYNSTYRVVSVLTVLHQDWLNGKEYKCKVSNKALAAPIEKTISKAKGQPREPQVYTLPPSREEMTKNQVSLTCLVKGFYPSDIAVEWESNGQPENNYKTTPPVLDSDGSFFLYSKLTVDKSRWQQGNVFSCSVMHEALHNHYTQKSLSLSPGK

SEQ ID NO: 4509 - protein, 495 aa, synthetic construct
DVQLLESGGGLVQPGGSLRLSCAASGFTFDDIAMTWVRQAPGKGLEWVSSIYSYGPNTYYADSVKGRFTISTDSAKNTLYLQMNSLRPEDTAVYYCAADSDLSTVTVGPHDYWGQGTQVTVPAGGGGSGGGGSGGGGSDVQLLESGGGLVQPGGSLRLSCAASGFTFDDIAMTWVRQAPGKGLEWVSSIYSYGPNTYYADSVKGRFTISTDSAKNTLYLQMNSLRPEDTAVYYCAADSDLSTVTVGPHDYWGQGTQVTVPAGGGGSESKYGPPCPPCPAPEFEGGPSVFLFPPKPKDTLMISRTPEVTCVVVDVSQEDPEVQFNWYVDGVEVHNAKTKPREEQFNSTYRVVSVLTVLHQDWLNGKEYKCKVSNKGLPSSIEKTISKAKGQPREPQVYTLPPSQEEMTKNQVSLTCLVKGFYPSDIAVEWESNGQPENNYKTTPPVLDSDGSFFLYSRLTVDKSRWQEGNVFSCSVMHEALHNHYTQKSLSLSLGK

SEQ ID NO: 4510 - protein, 493 aa, synthetic construct
DVQLLESGGGLVQPGGSLRLSCAASGFTFDDIAMTWVRQAPGKGLEWVSSIYSYGPNTYYADSVKGRFTISTDSAKNTLYLQMNSLRPEDTAVYYCAADSDLSTVTVGPHDYWGQGTQVTVPAGGGGSGGGGSGGGGSDVQLLESGGGLVQPGGSLRLSCAASGFTFDDIAMTWVRQAPGKGLEWVSSIYSYGPNTYYADSVKGRFTISTDSAKNTLYLQMNSLRPEDTAVYYCAADSDLSTVTVGPHDYWGQGTQVTVPAGGGGSDKTHTCPPCPAPEAAGGPSVFLFPPKPKDTLMISRTPEVTCVVVDVSHEDPEVKFNWYVDGVEVHNAKTKPREEQYNSTYRVVSVLTVLHQDWLNGKEYKCKVSNKALAAPIEKTISKAKGQPREPQVYTLPPSREEMTKNQVSLTCLVKGFYPSDIAVEWESNGQPENNYKTTPPVLDSDGSFFLYSKLTVDKSRWQQGNVFSCSVMHEALHNHYTQKSLSLSPGK

SEQ ID NO: 4511 - protein, 485 aa, synthetic construct
DVQLLESGGGLVQPGGSLRLSCAASGRTFGSYTMGWFRQAPGKEREFLASIRWTGGSTSYADSVKGRFTISRDDAKKTVYLQMNSLRPEDTAVYYCVASPTGRAFTYWGQGTQVTVAGGGGGSGGGGSGGGGSDVQLLESGGGLVQPGGSLRLSCAASGRTFGSYTMGWFRQAPGKEREFLASIRWTGGSTSYADSVKGRFTISRDDAKKTVYLQMNSLRPEDTAVYYCVASPTGRAFTYWGQGTQVTVAGGGGGSESKYGPPCPPCPAPEFEGGPSVFLFPPKPKDTLMISRTPEVTCVVVDVSQEDPEVQFNWYVDGVEVHNAKTKPREEQFNSTYRVVSVLTVLHQDWLNGKEYKCKVSNKGLPSSIEKTISKAKGQPREPQVYTLPPSQEEMTKNQVSLTCLVKGFYPSDIAVEWESNGQPENNYKTTPPVLDSDGSFFLYSRLTVDKSRWQEGNVFSCSVMHEALHNHYTQKSLSLSLGK

SEQ ID NO: 4512 - protein, 495 aa, synthetic construct
DVQLLESGGGLVQPGGSLRLSCAASGFTFDDIAMTWVRQAPGKGLEWVSSIYSYGPNTYYADSVKGRFTISTDSAKNTLYLQMNSLRPEDTAVYYCAADSDLSTVTVGPHDYWGQGTQVTVAGGGGGSGGGGSGGGGSDVQLLESGGGLVQPGGSLRLSCAASGFTFDDIAMTWVRQAPGKGLEWVSSIYSYGPNTYYADSVKGRFTISTDSAKNTLYLQMNSLRPEDTAVYYCAADSDLSTVTVGPHDYWGQGTQVTVAGGGGGSESKYGPPCPPCPAPEFEGGPSVFLFPPKPKDTLMISRTPEVTCVVVDVSQEDPEVQFNWYVDGVEVHNAKTKPREEQFNSTYRVVSVLTVLHQDWLNGKEYKCKVSNKGLPSSIEKTISKAKGQPREPQVYTLPPSQEEMTKNQVSLTCLVKGFYPSDIAVEWESNGQPENNYKTTPPVLDSDGSFFLYSRLTVDKSRWQEGNVFSCSVMHEALHNHYTQKSLSLSLGK

SEQ ID NO: 4513 - protein, 485 aa, synthetic construct
DVQLLESGGGLVQPGGSLRLSCAASGRTFSDYGMGWFRQAPGKDSEFVAAINWSNARTNYADSVKGRFTISRDNAKNTGYLQMNSLRVEDTAVYYCAATPSGKAYSYWGQGTQVTVAGGGGGSGGGGSGGGGSDVQLLESGGGLVQPGGSLRLSCAASGRTFSDYGMGWFRQAPGKDSEFVAAINWSNARTNYADSVKGRFTISRDNAKNTGYLQMNSLRVEDTAVYYCAATPSGKAYSYWGQGTQVTVAGGGGGSESKYGPPCPPCPAPEFEGGPSVFLFPPKPKDTLMISRTPEVTCVVVDVSQEDPEVQFNWYVDGVEVHNAKTKPREEQFNSTYRVVSVLTVLHQDWLNGKEYKCKVSNKGLPSSIEKTISKAKGQPREPQVYTLPPSQEEMTKNQVSLTCLVKGFYPSDIAVEWESNGQPENNYKTTPPVLDSDGSFFLYSRLTVDKSRWQEGNVFSCSVMHEALHNHYTQKSLSLSLGK

SEQ ID NO: 4514-4516 - skipped (3 entries)

SEQ ID NO: 4517 - protein, 21 aa, synthetic construct
  VARIANT 4: note = L or V
  VARIANT 6: note = F, V, or Y
  VARIANT 9: note = A, T, or V
  VARIANT 13: note = P or R
  VARIANT 16: note = M or T
AADXGXLYXDYVXLHXHHFGS

SEQ ID NO: 4518 - protein, 8 aa, synthetic construct
  VARIANT 2: note = N or S
  VARIANT 7: note = S or T
  VARIANT 8: note = T or V
IXSNDGXX

SEQ ID NO: 4519 - protein, 8 aa, synthetic construct
  VARIANT 2: note = F or V
  VARIANT 3: note = S or T
  VARIANT 6: note = D or Y
  VARIANT 7: note = H or Y
GXXLDXXT

SEQ ID NO: 4520 - protein, 8 aa, synthetic construct
GSIFRFPP

SEQ ID NO: 4521 - protein, 116 aa, synthetic construct; identical to SEQ ID NO: 640

SEQ ID NO: 4522 - DNA, 351 bp, synthetic construct
  source 1..351: mol_type = other DNA
gaggtgcagctggtggagagcggcggcggcctggtgcagcccggcggcagcctgagactgagctgcgccgccagcggcagcatcttcagattcccccccatgggctggtacagacaggcccccggcaagcagagagagcaggtggcccagctgaccagcggcggcagcaccaactacgccgacagcgtgaagggcagattcaccatcagcagagacaacgccaagaacacctggtacctgcagatgaacagcctgagacccgaggacaccgccgtgtactactgcagcgtgctgggcagagacatggtgacctactggggccagggcacccaggtgaccgtgagcagctga

SEQ ID NO: 4523 - protein, 116 aa, synthetic construct; identical to SEQ ID NO: 1127

SEQ ID NO: 4524 - protein, 16 aa, synthetic construct
AADSDLSTVTVGPHDY

SEQ ID NO: 4525 - DNA, 372 bp, synthetic construct
  source 1..372: mol_type = other DNA
gaggtgcagctgctggagagcggcggcggcctggtgcagcccggcggcagcctgagactgagctgcgccgccagcggcttcaccttcgacgacatcgccatgacctgggtgagacaggcccccggcaagggcctggagtgggtgagcagcatctacagctacggccccaacacctactacgccgacagcgtgaagggcagattcaccatcagcaccgacagcgccaagaacaccctgtacctgcagatgaacagcctgagacccgaggacaccgccgtgtactactgcgccgccgacagcgacctgagcaccgtgaccgtgggcccccacgactactggggccagggcacccaggtgaccgtgagcagctga

SEQ ID NO: 4526 - protein, 123 aa, synthetic construct; identical to SEQ ID NO: 4359

SEQ ID NO: 4527 - protein, 8 aa, synthetic construct
INWSNART

SEQ ID NO: 4528 - DNA, 357 bp, synthetic construct
  source 1..357: mol_type = other DNA
gaggtgcagctgctggagagcggcggcggcctggtgcagcccggcggcagcctgagactgagctgcgccgccagcggcagaaccttcagcgactacggcatgggctggttcagacaggcccccggcaaggacagcgagttcgtggccgccatcaactggagcaacgccagaaccaactacgccgacagcgtgaagggcagattcaccatcagcagagacaacgccaagaacaccggctacctgcagatgaacagcctgagagtggaggacaccgccgtgtactactgcgccgccacccccagcggcaaggcctacagctactggggccagggcacccaggtgaccgtgagcagctga

SEQ ID NO: 4529 - protein, 118 aa, synthetic construct; identical to SEQ ID NO: 4361

SEQ ID NO: 4530 - protein, 11 aa, synthetic construct
AAAPSGKAYSY

SEQ ID NO: 4531 - DNA, 357 bp, synthetic construct
  source 1..357: mol_type = other DNA
gaggtgcagctgctggagagcggcggcggcctggtgcagcccggcggcagcctgagactgagctgcgccgccagcggcagaaccttcagcgactacggcatgggctggttcagacaggcccccggcaaggacagcgagttcgtggccgccatcaactggagcaacgccagaaccaactacgccgacagcgtgaagggcagattcaccatcagcagagacaacgccaagaacaccggctacctgcagatgaacagcctgagagtggaggacaccgccgtgtactactgcgccgccgcccccagcggcaaggcctacagctactggggccagggcacccaggtgaccgtgagcagctga

SEQ ID NO: 4532 - protein, 118 aa, synthetic construct; identical to SEQ ID NO: 4363

SEQ ID NO: 4533 - protein, 8 aa, synthetic construct
GFTFDDIA

SEQ ID NO: 4534 - protein, 8 aa, synthetic construct
GFTFDDIA

SEQ ID NO: 4535 - protein, 8 aa, synthetic construct
GFTFDDIA

SEQ ID NO: 4536 - protein, 8 aa, synthetic construct
GFTFDDIA

SEQ ID NO: 4537 - protein, 8 aa, synthetic construct
GFTFDDIA

SEQ ID NO: 4538 - protein, 8 aa, synthetic construct
GFTFDDIA

SEQ ID NO: 4539 - protein, 8 aa, synthetic construct
GRTFSDYG

SEQ ID NO: 4540 - protein, 8 aa, synthetic construct
GRTFSDYG

SEQ ID NO: 4541 - protein, 8 aa, synthetic construct
GRTFSDYG

SEQ ID NO: 4542 - protein, 8 aa, synthetic construct
GRTFSDYG

SEQ ID NO: 4543 - protein, 8 aa, synthetic construct
GRTFSDYG

SEQ ID NO: 4544 - protein, 8 aa, synthetic construct
GRTFSDYG

SEQ ID NO: 4545 - protein, 8 aa, synthetic construct
GRTFSDYG

SEQ ID NO: 4546 - protein, 8 aa, synthetic construct
GRTFSDYG

SEQ ID NO: 4547 - protein, 8 aa, synthetic construct
GRTFSDYG

SEQ ID NO: 4548 - protein, 8 aa, synthetic construct
GRTFSDYG

SEQ ID NO: 4549 - protein, 8 aa, synthetic construct
GRTFSDYG

SEQ ID NO: 4550 - protein, 8 aa, synthetic construct
GRTFSDYG

SEQ ID NO: 4551 - protein, 8 aa, synthetic construct
GRTFGSYT

SEQ ID NO: 4552 - protein, 8 aa, synthetic construct
GRTFGSYT

SEQ ID NO: 4553 - protein, 8 aa, synthetic construct
GRTFGSYT

SEQ ID NO: 4554 - protein, 8 aa, synthetic construct
GRTFGSYT

SEQ ID NO: 4555 - protein, 8 aa, synthetic construct
GRTFGSYT

SEQ ID NO: 4556 - protein, 8 aa, synthetic construct
GRTFGSYT

SEQ ID NO: 4557 - protein, 8 aa, synthetic construct
IYSYGPNT

SEQ ID NO: 4558 - protein, 8 aa, synthetic construct
IYSYGPNT

SEQ ID NO: 4559 - protein, 8 aa, synthetic construct
IYSYGPNT

SEQ ID NO: 4560 - protein, 8 aa, synthetic construct
IYSYGPNT

SEQ ID NO: 4561 - protein, 8 aa, synthetic construct
IYSYGPNT

SEQ ID NO: 4562 - protein, 8 aa, synthetic construct
IYSYGPNT

SEQ ID NO: 4563 - protein, 8 aa, synthetic construct
INWSNART

SEQ ID NO: 4564 - protein, 8 aa, synthetic construct
INWSNART

SEQ ID NO: 4565 - protein, 8 aa, synthetic construct
INWSNART

SEQ ID NO: 4566 - protein, 8 aa, synthetic construct
INWSNART

SEQ ID NO: 4567 - protein, 8 aa, synthetic construct
INWSNART

SEQ ID NO: 4568 - protein, 8 aa, synthetic construct
INWSNART

SEQ ID NO: 4569 - protein, 8 aa, synthetic construct
INWSNART

SEQ ID NO: 4570 - protein, 8 aa, synthetic construct
INWSNART

SEQ ID NO: 4571 - protein, 8 aa, synthetic construct
INWSNART

SEQ ID NO: 4572 - protein, 8 aa, synthetic construct
INWSNART

SEQ ID NO: 4573 - protein, 8 aa, synthetic construct
INWSNART

SEQ ID NO: 4574 - protein, 8 aa, synthetic construct
INWSNART

SEQ ID NO: 4575 - protein, 8 aa, synthetic construct
IRWTGGST

SEQ ID NO: 4576 - protein, 8 aa, synthetic construct
IRWTGGST

SEQ ID NO: 4577 - protein, 8 aa, synthetic construct
IRWTGGST

SEQ ID NO: 4578 - protein, 8 aa, synthetic construct
IRWTGGST

SEQ ID NO: 4579 - protein, 8 aa, synthetic construct
IRWTGGST

SEQ ID NO: 4580 - protein, 8 aa, synthetic construct
IRWTGGST

SEQ ID NO: 4581 - protein, 16 aa, synthetic construct
AADSDLSTVTVGPHDY

SEQ ID NO: 4582 - protein, 16 aa, synthetic construct
AADSDLSTVTVGPHDY

SEQ ID NO: 4583 - protein, 16 aa, synthetic construct
AADSDLSTVTVGPHDY

SEQ ID NO: 4584 - protein, 16 aa, synthetic construct
AADSDLSTVTVGPHDY

SEQ ID NO: 4585 - protein, 16 aa, synthetic construct
AADSDLSTVTVGPHDY

SEQ ID NO: 4586 - protein, 16 aa, synthetic construct
AADSDLSTVTVGPHDY

SEQ ID NO: 4587 - protein, 11 aa, synthetic construct
AATPSGKAYSY

SEQ ID NO: 4588 - protein, 11 aa, synthetic construct
AATPSGKAYSY

SEQ ID NO: 4589 - protein, 11 aa, synthetic construct
AATPSGKAYSY

SEQ ID NO: 4590 - protein, 11 aa, synthetic construct
AATPSGKAYSY

SEQ ID NO: 4591 - protein, 11 aa, synthetic construct
AATPSGKAYSY

SEQ ID NO: 4592 - protein, 11 aa, synthetic construct
AATPSGKAYSY

SEQ ID NO: 4593 - protein, 11 aa, synthetic construct
AAAPSGKAYSY

SEQ ID NO: 4594 - protein, 11 aa, synthetic construct
AAAPSGKAYSY

SEQ ID NO: 4595 - protein, 11 aa, synthetic construct
AAAPSGKAYSY

SEQ ID NO: 4596 - protein, 11 aa, synthetic construct
AAAPSGKAYSY

SEQ ID NO: 4597 - protein, 11 aa, synthetic construct
AAAPSGKAYSY

SEQ ID NO: 4598 - protein, 11 aa, synthetic construct
AAAPSGKAYSY

SEQ ID NO: 4599 - protein, 11 aa, synthetic construct
VASPTGRAFTY

SEQ ID NO: 4600 - protein, 11 aa, synthetic construct
VASPTGRAFTY

SEQ ID NO: 4601 - protein, 11 aa, synthetic construct
VASPTGRAFTY

SEQ ID NO: 4602 - protein, 11 aa, synthetic construct
VASPTGRAFTY

SEQ ID NO: 4603 - protein, 11 aa, synthetic construct
VASPTGRAFTY

SEQ ID NO: 4604 - protein, 11 aa, synthetic construct
VASPTGRAFTY

SEQ ID NO: 4605 - protein, 123 aa, synthetic construct; identical to SEQ ID NO: 4359

SEQ ID NO: 4606 - protein, 123 aa, synthetic construct
DVQLLESGGGLVQPGGSLRLSCAASGFTFDDIAMTWVRQAPGKGLEWVSSIYSYGPNTYYADSVKGRFTISTDSAKNTLYLQMNSLRPEDTAVYYCAADSDLSTVTVGPHDYWGQGTQVTVSS

SEQ ID NO: 4607 - protein, 124 aa, synthetic construct
EVQLLESGGGLVQPGGSLRLSCAASGFTFDDIAMTWVRQAPGKGLEWVSSIYSYGPNTYYADSVKGRFTISTDSAKNTLYLQMNSLRPEDTAVYYCAADSDLSTVTVGPHDYWGQGTQVTVPAG

SEQ ID NO: 4608 - protein, 124 aa, synthetic construct
DVQLLESGGGLVQPGGSLRLSCAASGFTFDDIAMTWVRQAPGKGLEWVSSIYSYGPNTYYADSVKGRFTISTDSAKNTLYLQMNSLRPEDTAVYYCAADSDLSTVTVGPHDYWGQGTQVTVPAG

SEQ ID NO: 4609 - protein, 124 aa, synthetic construct
EVQLLESGGGLVQPGGSLRLSCAASGFTFDDIAMTWVRQAPGKGLEWVSSIYSYGPNTYYADSVKGRFTISTDSAKNTLYLQMNSLRPEDTAVYYCAADSDLSTVTVGPHDYWGQGTQVTVAGG

SEQ ID NO: 4610 - protein, 124 aa, synthetic construct
DVQLLESGGGLVQPGGSLRLSCAASGFTFDDIAMTWVRQAPGKGLEWVSSIYSYGPNTYYADSVKGRFTISTDSAKNTLYLQMNSLRPEDTAVYYCAADSDLSTVTVGPHDYWGQGTQVTVAGG

SEQ ID NO: 4611 - protein, 118 aa, synthetic construct; identical to SEQ ID NO: 4361

SEQ ID NO: 4612 - protein, 118 aa, synthetic construct
DVQLLESGGGLVQPGGSLRLSCAASGRTFSDYGMGWFRQAPGKDSEFVAAINWSNARTNYADSVKGRFTISRDNAKNTGYLQMNSLRVEDTAVYYCAATPSGKAYSYWGQGTQVTVSS

SEQ ID NO: 4613 - protein, 119 aa, synthetic construct
EVQLLESGGGLVQPGGSLRLSCAASGRTFSDYGMGWFRQAPGKDSEFVAAINWSNARTNYADSVKGRFTISRDNAKNTGYLQMNSLRVEDTAVYYCAATPSGKAYSYWGQGTQVTVPAG

SEQ ID NO: 4614 - protein, 119 aa, synthetic construct
DVQLLESGGGLVQPGGSLRLSCAASGRTFSDYGMGWFRQAPGKDSEFVAAINWSNARTNYADSVKGRFTISRDNAKNTGYLQMNSLRVEDTAVYYCAATPSGKAYSYWGQGTQVTVPAG

SEQ ID NO: 4615 - protein, 119 aa, synthetic construct
EVQLLESGGGLVQPGGSLRLSCAASGRTFSDYGMGWFRQAPGKDSEFVAAINWSNARTNYADSVKGRFTISRDNAKNTGYLQMNSLRVEDTAVYYCAATPSGKAYSYWGQGTQVTVAGG

SEQ ID NO: 4616 - protein, 119 aa, synthetic construct
DVQLLESGGGLVQPGGSLRLSCAASGRTFSDYGMGWFRQAPGKDSEFVAAINWSNARTNYADSVKGRFTISRDNAKNTGYLQMNSLRVEDTAVYYCAATPSGKAYSYWGQGTQVTVAGG

SEQ ID NO: 4617 - protein, 118 aa, synthetic construct; identical to SEQ ID NO: 4363

SEQ ID NO: 4618 - protein, 118 aa, synthetic construct
DVQLLESGGGLVQPGGSLRLSCAASGRTFSDYGMGWFRQAPGKDSEFVAAINWSNARTNYADSVKGRFTISRDNAKNTGYLQMNSLRVEDTAVYYCAAAPSGKAYSYWGQGTQVTVSS

SEQ ID NO: 4619 - protein, 119 aa, synthetic construct
EVQLLESGGGLVQPGGSLRLSCAASGRTFSDYGMGWFRQAPGKDSEFVAAINWSNARTNYADSVKGRFTISRDNAKNTGYLQMNSLRVEDTAVYYCAAAPSGKAYSYWGQGTQVTVPAG

SEQ ID NO: 4620 - protein, 119 aa, synthetic construct
DVQLLESGGGLVQPGGSLRLSCAASGRTFSDYGMGWFRQAPGKDSEFVAAINWSNARTNYADSVKGRFTISRDNAKNTGYLQMNSLRVEDTAVYYCAAAPSGKAYSYWGQGTQVTVPAG

SEQ ID NO: 4621 - protein, 119 aa, synthetic construct
EVQLLESGGGLVQPGGSLRLSCAASGRTFSDYGMGWFRQAPGKDSEFVAAINWSNARTNYADSVKGRFTISRDNAKNTGYLQMNSLRVEDTAVYYCAAAPSGKAYSYWGQGTQVTVAGG

SEQ ID NO: 4622 - protein, 119 aa, synthetic construct
DVQLLESGGGLVQPGGSLRLSCAASGRTFSDYGMGWFRQAPGKDSEFVAAINWSNARTNYADSVKGRFTISRDNAKNTGYLQMNSLRVEDTAVYYCAAAPSGKAYSYWGQGTQVTVAGG

SEQ ID NO: 4623 - protein, 118 aa, synthetic construct; identical to SEQ ID NO: 4078

SEQ ID NO: 4624 - protein, 118 aa, synthetic construct
DVQLLESGGGLVQPGGSLRLSCAASGRTFGSYTMGWFRQAPGKEREFLASIRWTGGSTSYADSVKGRFTISRDDAKKTVYLQMNSLRPEDTAVYYCVASPTGRAFTYWGQGTQVTVSS

SEQ ID NO: 4625 - protein, 119 aa, synthetic construct
EVQLLESGGGLVQPGGSLRLSCAASGRTFGSYTMGWFRQAPGKEREFLASIRWTGGSTSYADSVKGRFTISRDDAKKTVYLQMNSLRPEDTAVYYCVASPTGRAFTYWGQGTQVTVPAG

SEQ ID NO: 4626 - protein, 119 aa, synthetic construct
DVQLLESGGGLVQPGGSLRLSCAASGRTFGSYTMGWFRQAPGKEREFLASIRWTGGSTSYADSVKGRFTISRDDAKKTVYLQMNSLRPEDTAVYYCVASPTGRAFTYWGQGTQVTVPAG

SEQ ID NO: 4627 - protein, 119 aa, synthetic construct
EVQLLESGGGLVQPGGSLRLSCAASGRTFGSYTMGWFRQAPGKEREFLASIRWTGGSTSYADSVKGRFTISRDDAKKTVYLQMNSLRPEDTAVYYCVASPTGRAFTYWGQGTQVTVAGG

SEQ ID NO: 4628 - protein, 119 aa, synthetic construct
DVQLLESGGGLVQPGGSLRLSCAASGRTFGSYTMGWFRQAPGKEREFLASIRWTGGSTSYADSVKGRFTISRDDAKKTVYLQMNSLRPEDTAVYYCVASPTGRAFTYWGQGTQVTVAGG

SEQ ID NO: 4629 - DNA, 372 bp, synthetic construct; identical to SEQ ID NO: 4525
  source 1..372: mol_type = other DNA

SEQ ID NO: 4630 - DNA, 372 bp, synthetic construct
  source 1..372: mol_type = other DNA
gacgtgcagctgctggagagcggcggcggcctggtgcagcccggcggcagcctgagactgagctgcgccgccagcggcttcaccttcgacgacatcgccatgacctgggtgagacaggcccccggcaagggcctggagtgggtgagcagcatctacagctacggccccaacacctactacgccgacagcgtgaagggcagattcaccatcagcaccgacagcgccaagaacaccctgtacctgcagatgaacagcctgagacccgaggacaccgccgtgtactactgcgccgccgacagcgacctgagcaccgtgaccgtgggcccccacgactactggggccagggcacccaggtgaccgtgagcagctga

SEQ ID NO: 4631 - DNA, 375 bp, synthetic construct
  source 1..375: mol_type = other DNA
gaggtgcagctgctggagagcggcggcggcctggtgcagcccggcggcagcctgagactgagctgcgccgccagcggcttcaccttcgacgacatcgccatgacctgggtgagacaggcccccggcaagggcctggagtgggtgagcagcatctacagctacggccccaacacctactacgccgacagcgtgaagggcagattcaccatcagcaccgacagcgccaagaacaccctgtacctgcagatgaacagcctgagacccgaggacaccgccgtgtactactgcgccgccgacagcgacctgagcaccgtgaccgtgggcccccacgactactggggccagggcacccaggtgaccgtgcccgccggctga

SEQ ID NO: 4632 - DNA, 375 bp, synthetic construct
  source 1..375: mol_type = other DNA
gacgtgcagctgctggagagcggcggcggcctggtgcagcccggcggcagcctgagactgagctgcgccgccagcggcttcaccttcgacgacatcgccatgacctgggtgagacaggcccccggcaagggcctggagtgggtgagcagcatctacagctacggccccaacacctactacgccgacagcgtgaagggcagattcaccatcagcaccgacagcgccaagaacaccctgtacctgcagatgaacagcctgagacccgaggacaccgccgtgtactactgcgccgccgacagcgacctgagcaccgtgaccgtgggcccccacgactactggggccagggcacccaggtgaccgtgcccgccggctga

SEQ ID NO: 4633 - DNA, 375 bp, synthetic construct
  source 1..375: mol_type = other DNA
gaggtgcagctgctggagagcggcggcggcctggtgcagcccggcggcagcctgagactgagctgcgccgccagcggcttcaccttcgacgacatcgccatgacctgggtgagacaggcccccggcaagggcctggagtgggtgagcagcatctacagctacggccccaacacctactacgccgacagcgtgaagggcagattcaccatcagcaccgacagcgccaagaacaccctgtacctgcagatgaacagcctgagacccgaggacaccgccgtgtactactgcgccgccgacagcgacctgagcaccgtgaccgtgggcccccacgactactggggccagggcacccaggtgaccgtggccggcggctga

SEQ ID NO: 4634 - DNA, 375 bp, synthetic construct
  source 1..375: mol_type = other DNA
gacgtgcagctgctggagagcggcggcggcctggtgcagcccggcggcagcctgagactgagctgcgccgccagcggcttcaccttcgacgacatcgccatgacctgggtgagacaggcccccggcaagggcctggagtgggtgagcagcatctacagctacggccccaacacctactacgccgacagcgtgaagggcagattcaccatcagcaccgacagcgccaagaacaccctgtacctgcagatgaacagcctgagacccgaggacaccgccgtgtactactgcgccgccgacagcgacctgagcaccgtgaccgtgggcccccacgactactggggccagggcacccaggtgaccgtggccggcggctga

SEQ ID NO: 4635 - DNA, 357 bp, synthetic construct; identical to SEQ ID NO: 4528
  source 1..357: mol_type = other DNA

SEQ ID NO: 4636 - DNA, 357 bp, synthetic construct
  source 1..357: mol_type = other DNA
gacgtgcagctgctggagagcggcggcggcctggtgcagcccggcggcagcctgagactgagctgcgccgccagcggcagaaccttcagcgactacggcatgggctggttcagacaggcccccggcaaggacagcgagttcgtggccgccatcaactggagcaacgccagaaccaactacgccgacagcgtgaagggcagattcaccatcagcagagacaacgccaagaacaccggctacctgcagatgaacagcctgagagtggaggacaccgccgtgtactactgcgccgccacccccagcggcaaggcctacagctactggggccagggcacccaggtgaccgtgagcagctga

SEQ ID NO: 4637 - DNA, 360 bp, synthetic construct
  source 1..360: mol_type = other DNA
gaggtgcagctgctggagagcggcggcggcctggtgcagcccggcggcagcctgagactgagctgcgccgccagcggcagaaccttcagcgactacggcatgggctggttcagacaggcccccggcaaggacagcgagttcgtggccgccatcaactggagcaacgccagaaccaactacgccgacagcgtgaagggcagattcaccatcagcagagacaacgccaagaacaccggctacctgcagatgaacagcctgagagtggaggacaccgccgtgtactactgcgccgccacccccagcggcaaggcctacagctactggggccagggcacccaggtgaccgtgcccgccggctga

SEQ ID NO: 4638 - DNA, 360 bp, synthetic construct
  source 1..360: mol_type = other DNA
gacgtgcagctgctggagagcggcggcggcctggtgcagcccggcggcagcctgagactgagctgcgccgccagcggcagaaccttcagcgactacggcatgggctggttcagacaggcccccggcaaggacagcgagttcgtggccgccatcaactggagcaacgccagaaccaactacgccgacagcgtgaagggcagattcaccatcagcagagacaacgccaagaacaccggctacctgcagatgaacagcctgagagtggaggacaccgccgtgtactactgcgccgccacccccagcggcaaggcctacagctactggggccagggcacccaggtgaccgtgcccgccggctga

SEQ ID NO: 4639 - DNA, 360 bp, synthetic construct
  source 1..360: mol_type = other DNA
gaggtgcagctgctggagagcggcggcggcctggtgcagcccggcggcagcctgagactgagctgcgccgccagcggcagaaccttcagcgactacggcatgggctggttcagacaggcccccggcaaggacagcgagttcgtggccgccatcaactggagcaacgccagaaccaactacgccgacagcgtgaagggcagattcaccatcagcagagacaacgccaagaacaccggctacctgcagatgaacagcctgagagtggaggacaccgccgtgtactactgcgccgccacccccagcggcaaggcctacagctactggggccagggcacccaggtgaccgtggccggcggctga

SEQ ID NO: 4640 - DNA, 360 bp, synthetic construct
  source 1..360: mol_type = other DNA
gacgtgcagctgctggagagcggcggcggcctggtgcagcccggcggcagcctgagactgagctgcgccgccagcggcagaaccttcagcgactacggcatgggctggttcagacaggcccccggcaaggacagcgagttcgtggccgccatcaactggagcaacgccagaaccaactacgccgacagcgtgaagggcagattcaccatcagcagagacaacgccaagaacaccggctacctgcagatgaacagcctgagagtggaggacaccgccgtgtactactgcgccgccacccccagcggcaaggcctacagctactggggccagggcacccaggtgaccgtggccggcggctga

SEQ ID NO: 4641 - DNA, 357 bp, synthetic construct; identical to SEQ ID NO: 4531
  source 1..357: mol_type = other DNA

SEQ ID NO: 4642 - DNA, 357 bp, synthetic construct
  source 1..357: mol_type = other DNA
gacgtgcagctgctggagagcggcggcggcctggtgcagcccggcggcagcctgagactgagctgcgccgccagcggcagaaccttcagcgactacggcatgggctggttcagacaggcccccggcaaggacagcgagttcgtggccgccatcaactggagcaacgccagaaccaactacgccgacagcgtgaagggcagattcaccatcagcagagacaacgccaagaacaccggctacctgcagatgaacagcctgagagtggaggacaccgccgtgtactactgcgccgccgcccccagcggcaaggcctacagctactggggccagggcacccaggtgaccgtgagcagctga

SEQ ID NO: 4643 - DNA, 360 bp, synthetic construct
  source 1..360: mol_type = other DNA
gaggtgcagctgctggagagcggcggcggcctggtgcagcccggcggcagcctgagactgagctgcgccgccagcggcagaaccttcagcgactacggcatgggctggttcagacaggcccccggcaaggacagcgagttcgtggccgccatcaactggagcaacgccagaaccaactacgccgacagcgtgaagggcagattcaccatcagcagagacaacgccaagaacaccggctacctgcagatgaacagcctgagagtggaggacaccgccgtgtactactgcgccgccgcccccagcggcaaggcctacagctactggggccagggcacccaggtgaccgtgcccgccggctga

SEQ ID NO: 4644 - DNA, 360 bp, synthetic construct
  source 1..360: mol_type = other DNA
gacgtgcagctgctggagagcggcggcggcctggtgcagcccggcggcagcctgagactgagctgcgccgccagcggcagaaccttcagcgactacggcatgggctggttcagacaggcccccggcaaggacagcgagttcgtggccgccatcaactggagcaacgccagaaccaactacgccgacagcgtgaagggcagattcaccatcagcagagacaacgccaagaacaccggctacctgcagatgaacagcctgagagtggaggacaccgccgtgtactactgcgccgccgcccccagcggcaaggcctacagctactggggccagggcacccaggtgaccgtgcccgccggctga

SEQ ID NO: 4645 - DNA, 360 bp, synthetic construct
  source 1..360: mol_type = other DNA
gaggtgcagctgctggagagcggcggcggcctggtgcagcccggcggcagcctgagactgagctgcgccgccagcggcagaaccttcagcgactacggcatgggctggttcagacaggcccccggcaaggacagcgagttcgtggccgccatcaactggagcaacgccagaaccaactacgccgacagcgtgaagggcagattcaccatcagcagagacaacgccaagaacaccggctacctgcagatgaacagcctgagagtggaggacaccgccgtgtactactgcgccgccgcccccagcggcaaggcctacagctactggggccagggcacccaggtgaccgtggccggcggctga

SEQ ID NO: 4646 - DNA, 360 bp, synthetic construct
  source 1..360: mol_type = other DNA
gacgtgcagctgctggagagcggcggcggcctggtgcagcccggcggcagcctgagactgagctgcgccgccagcggcagaaccttcagcgactacggcatgggctggttcagacaggcccccggcaaggacagcgagttcgtggccgccatcaactggagcaacgccagaaccaactacgccgacagcgtgaagggcagattcaccatcagcagagacaacgccaagaacaccggctacctgcagatgaacagcctgagagtggaggacaccgccgtgtactactgcgccgccgcccccagcggcaaggcctacagctactggggccagggcacccaggtgaccgtggccggcggctga

SEQ ID NO: 4647 - DNA, 357 bp, synthetic construct
  source 1..357: mol_type = other DNA
gaggtgcagctgctggagagcggcggcggcctggtgcagcccggcggcagcctgagactgagctgcgccgccagcggcagaaccttcggcagctacaccatgggctggttcagacaggcccccggcaaggagagagagttcctggccagcatcagatggaccggcggcagcaccagctacgccgacagcgtgaagggcagattcaccatcagcagagacgacgccaagaagaccgtgtacctgcagatgaacagcctgagacccgaggacaccgccgtgtactactgcgtggccagccccaccggcagagccttcacctactggggccagggcacccaggtgaccgtgagcagctga

SEQ ID NO: 4648 - DNA, 357 bp, synthetic construct
  source 1..357: mol_type = other DNA
gacgtgcagctgctggagagcggcggcggcctggtgcagcccggcggcagcctgagactgagctgcgccgccagcggcagaaccttcggcagctacaccatgggctggttcagacaggcccccggcaaggagagagagttcctggccagcatcagatggaccggcggcagcaccagctacgccgacagcgtgaagggcagattcaccatcagcagagacgacgccaagaagaccgtgtacctgcagatgaacagcctgagacccgaggacaccgccgtgtactactgcgtggccagccccaccggcagagccttcacctactggggccagggcacccaggtgaccgtgagcagctga

SEQ ID NO: 4649 - DNA, 360 bp, synthetic construct
  source 1..360: mol_type = other DNA
gaggtgcagctgctggagagcggcggcggcctggtgcagcccggcggcagcctgagactgagctgcgccgccagcggcagaaccttcggcagctacaccatgggctggttcagacaggcccccggcaaggagagagagttcctggccagcatcagatggaccggcggcagcaccagctacgccgacagcgtgaagggcagattcaccatcagcagagacgacgccaagaagaccgtgtacctgcagatgaacagcctgagacccgaggacaccgccgtgtactactgcgtggccagccccaccggcagagccttcacctactggggccagggcacccaggtgaccgtgcccgccggctga

SEQ ID NO: 4650 - DNA, 360 bp, synthetic construct
  source 1..360: mol_type = other DNA
gacgtgcagctgctggagagcggcggcggcctggtgcagcccggcggcagcctgagactgagctgcgccgccagcggcagaaccttcggcagctacaccatgggctggttcagacaggcccccggcaaggagagagagttcctggccagcatcagatggaccggcggcagcaccagctacgccgacagcgtgaagggcagattcaccatcagcagagacgacgccaagaagaccgtgtacctgcagatgaacagcctgagacccgaggacaccgccgtgtactactgcgtggccagccccaccggcagagccttcacctactggggccagggcacccaggtgaccgtgcccgccggctga

SEQ ID NO: 4651 - DNA, 360 bp, synthetic construct
  source 1..360: mol_type = other DNA
gaggtgcagctgctggagagcggcggcggcctggtgcagcccggcggcagcctgagactgagctgcgccgccagcggcagaaccttcggcagctacaccatgggctggttcagacaggcccccggcaaggagagagagttcctggccagcatcagatggaccggcggcagcaccagctacgccgacagcgtgaagggcagattcaccatcagcagagacgacgccaagaagaccgtgtacctgcagatgaacagcctgagacccgaggacaccgccgtgtactactgcgtggccagccccaccggcagagccttcacctactggggccagggcacccaggtgaccgtggccggcggctga

SEQ ID NO: 4652 - DNA, 360 bp, synthetic construct
  source 1..360: mol_type = other DNA
gacgtgcagctgctggagagcggcggcggcctggtgcagcccggcggcagcctgagactgagctgcgccgccagcggcagaaccttcggcagctacaccatgggctggttcagacaggcccccggcaaggagagagagttcctggccagcatcagatggaccggcggcagcaccagctacgccgacagcgtgaagggcagattcaccatcagcagagacgacgccaagaagaccgtgtacctgcagatgaacagcctgagacccgaggacaccgccgtgtactactgcgtggccagccccaccggcagagccttcacctactggggccagggcacccaggtgaccgtggccggcggctga

SEQ ID NO: 4653 - protein, 123 aa, synthetic construct; identical to SEQ ID NO: 11

SEQ ID NO: 4654 - protein, 123 aa, synthetic construct; identical to SEQ ID NO: 83

SEQ ID NO: 4655 - protein, 123 aa, synthetic construct; identical to SEQ ID NO: 4359

SEQ ID NO: 4656 - protein, 124 aa, synthetic construct; identical to SEQ ID NO: 4608

SEQ ID NO: 4657 - protein, 118 aa, synthetic construct; identical to SEQ ID NO: 19

SEQ ID NO: 4658 - protein, 118 aa, synthetic construct; identical to SEQ ID NO: 85

SEQ ID NO: 4659 - protein, 118 aa, synthetic construct; identical to SEQ ID NO: 4361

SEQ ID NO: 4660 - protein, 119 aa, synthetic construct; identical to SEQ ID NO: 4613

SEQ ID NO: 4661 - protein, 119 aa, synthetic construct; identical to SEQ ID NO: 4614

SEQ ID NO: 4662 - protein, 119 aa, synthetic construct; identical to SEQ ID NO: 4620

SEQ ID NO: 4663 - protein, 119 aa, synthetic construct
DVQLLESGGGLVQPGGSLRLSCAASGRTFSDYGMGWFRQAPGKDSEFVAAINWSNARTNYADSVKGRFTISRDNAKNTGYLQMNSLRVEDTAVYYCAATASGKAYSYWGQGTQVTVPAG

SEQ ID NO: 4664 - protein, 119 aa, synthetic construct
DVQLLESGGGLVQPGGSLRLSCAASGRTFSDYGMGWFRQAPGKDSEFVAAINWSNARTNYADSVKGRFTISRDNAKNTGYLQMNSLRVEDTAVYYCAATPAGKAYSYWGQGTQVTVPAG

SEQ ID NO: 4665 - protein, 119 aa, synthetic construct
DVQLLESGGGLVQPGGSLRLSCAASGRTFSDYGMGWFRQAPGKDSEFVAAINWSNARTNYADSVKGRFTISRDNAKNTGYLQMNSLRVEDTAVYYCAATPSAKAYSYWGQGTQVTVPAG

SEQ ID NO: 4666 - protein, 119 aa, synthetic construct
DVQLLESGGGLVQPGGSLRLSCAASGRTFSDYGMGWFRQAPGKDSEFVAAINWSNARTNYADSVKGRFTISRDNAKNTGYLQMNSLRVEDTAVYYCAATPSGAAYSYWGQGTQVTVPAG

SEQ ID NO: 4667 - protein, 119 aa, synthetic construct
DVQLLESGGGLVQPGGSLRLSCAASGRTFSDYGMGWFRQAPGKDSEFVAAINWSNARTNYADSVKGRFTISRDNAKNTGYLQMNSLRVEDTAVYYCAATPSGKAASYWGQGTQVTVPAG

SEQ ID NO: 4668 - protein, 119 aa, synthetic construct
DVQLLESGGGLVQPGGSLRLSCAASGRTFSDYGMGWFRQAPGKDSEFVAAINWSNARTNYADSVKGRFTISRDNAKNTGYLQMNSLRVEDTAVYYCAATPSGKAYAYWGQGTQVTVPAG

SEQ ID NO: 4669 - protein, 119 aa, synthetic construct
DVQLLESGGGLVQPGGSLRLSCAASGRTFSDYGMGWFRQAPGKDSEFVAAINWSNARTNYADSVKGRFTISRDNAKNTGYLQMNSLRVEDTAVYYCAATPSGKAYSAWGQGTQVTVPAG

SEQ ID NO: 4670 - protein, 118 aa, synthetic construct
EVQLVESGGGLVQPGESLKLSCEASGRTFSDYGMGWFRKTPEKDSEFVAAINWSNGRTNYPDTVERRFIISRDNAKNTGYLQMSSLRVEDTALYYCAATPSGKAYSYWGQGTQVTVSS

SEQ ID NO: 4671 - protein, 118 aa, synthetic construct
EVQLVESGGGLVKPGGSLKLSCAASGRTFSDYGMGWFRQTPEKDSEFVAAINWSNGRTNYPDNVKGRFTISRDNAKNNGYLQMSHLKVEDTAMYYCAATPSGKAYSYWGQGTQVTVSS

SEQ ID NO: 4672 - protein, 118 aa, synthetic construct
EVQLVESGGDLVKPGGSLKLSCAASGRTFSDYGMGWFRQTPEKDSEFVAAINWSNGRTNYPDSVKGRFTISRDNAKNTGYLQMSSLKVEDTAMYYCAATPSGKAYSYWGQGTQVTVSS

SEQ ID NO: 4673 - protein, 118 aa, synthetic construct
EVMLVESGGGLVKPGGSLKLSCAASGRTFSDYGMGWFRQTPEKDSEFVAAINWSNGRTNYPDSVKGRFTISRDNAKNTGYLQMSSLRVEDTALYYCAATPSGKAYSYWGQGTQVTVSS

SEQ ID NO: 4674 - protein, 118 aa, synthetic construct
EVKLVESGGGLVQPGGSLKLSCAASGRTFSDYGMGWFRQTPEKDSEFVAAINWSNGRTNYPDTVKGRFTISRDNAKNTGYLQMSRLKVEDTAMYYCAATPSGKAYSYWGQGTQVTVSS

SEQ ID NO: 4675 - protein, 118 aa, synthetic construct
EVKLVESGGGLVQPGGSLKLSCAASGRTFSDYGMGWFRQAPRKDSEFVAAINWSNGRTNYADTVTGRFTISRDNAKNTGYLEMSSLRVEDTAMYYCAATPSGKAYSYWGQGTQVTVSS

SEQ ID NO: 4676 - protein, 118 aa, synthetic construct
EVKLVESEGGLVQPGSSLKLSCTASGRTFSDYGMGWFRQVPEKDSEFVAAINWSNGRTNYLDSVKSRFIISRDNAKNIGYLQMSSLKVEDTATYYCAATPSGKAYSYWGQGTQVTVSS

SEQ ID NO: 4677 - protein, 118 aa, synthetic construct
EVQLVESGGGLVKPGGSLKLSCAASGRTFSDYGMGWFRQAPEKDSEFVAAINWSNGRTNYADTVKGRFTISRDNAKNTGFLQMTSLRVEDTAMYYCAATPSGKAYSYWGQGTQVTVSS

SEQ ID NO: 4678 - protein, 118 aa, synthetic construct
EVQLVESGGGLVQPGGSLKLSCAASGRTFSDYGMGWFRQTPEKDSEFVAAINWSNGRTNYPDTVKGRFTISRDNAKNTGYLQMSSLRVEDTAMYYCAATPSGKAYSYWGQGTQVTVSS

SEQ ID NO: 4679 - protein, 118 aa, synthetic construct
EVMLVESGGGLVKPGGSLKLSCAASGRTFSDYGMSWVRQTPEKRLEWVATINWSNGRTYYPDSVKGRFTISRDNAKNTLYLQMSSLRSEDTALYYCAATPSGKAYSYWGQGTSVTVSS

SEQ ID NO: 4680 - protein, 116 aa, synthetic construct; identical to SEQ ID NO: 640

SEQ ID NO: 4681 - protein, 116 aa, synthetic construct; identical to SEQ ID NO: 1127

SEQ ID NO: 4682 - protein, 117 aa, synthetic construct
DVQLVESGGGLVQPGGSLRLSCAASGSIFRFPPMGWYRQAPGKQREQVAQLTSGGSTNYADSVKGRFTISRDNAKNTWYLQMNSLRPEDTAVYYCSVLGRDMVTYWGQGTQVTVPAG

SEQ ID NO: 4683 - protein, 117 aa, synthetic construct
DVQLVESGGGLVQPGGSLRLSCAASGSIFRFPPMGWYRQAPGKQREQVAQLTSGGSTNYADSVKGRFTISRDNAKNTWYLQMNSLRPEDTAVYYCSVLGRDLVTYWGQGTQVTVPAG

SEQ ID NO: 4684 - protein, 117 aa, synthetic construct
DVQLVESGGGLVQPGGSLRLSCAASGSIFRFPPMGWYRQAPGKQREQVAQLTSGGSTNYADSVKGRFTISRDNAKNTWYLQMNSLRPEDTAVYYCSVLGRDRVTYWGQGTQVTVPAG

SEQ ID NO: 4685 - protein, 117 aa, synthetic construct
DVQLVESGGGLVQPGGSLRLSCAASGSIFRFPPMGWYRQAPGKQREQVAQLTSGGSTNYADSVKGRFTISRDNAKNTWYLQMNSLRPEDTAVYYCSVLGRDIVTYWGQGTQVTVPAG

SEQ ID NO: 4686 - protein, 479 aa, synthetic construct
DVQLVESGGGLVQPGGSLRLSCAASGSIFRFPPMGWYRQAPGKQREQVAQLTSGGSTNYADSVKGRFTISRDNAKNTWYLQMNSLRPEDTAVYYCSVLGRDLVTYWGQGTQVTVPAGGGGSGGGGSGGGGSDVQLVESGGGLVQPGGSLRLSCAASGSIFRFPPMGWYRQAPGKQREQVAQLTSGGSTNYADSVKGRFTISRDNAKNTWYLQMNSLRPEDTAVYYCSVLGRDLVTYWGQGTQVTVPAGGGGSDKTHTCPPCPAPEAAGGPSVFLFPPKPKDTLMISRTPEVTCVVVDVSHEDPEVKFNWYVDGVEVHNAKTKPREEQYNSTYRVVSVLTVLHQDWLNGKEYKCKVSNKALAAPIEKTISKAKGQPREPQVYTLPPSREEMTKNQVSLTCLVKGFYPSDIAVEWESNGQPENNYKTTPPVLDSDGSFFLYSKLTVDKSRWQQGNVFSCSVMHEALHNHYTQKSLSLSPGK

SEQ ID NO: 4687 - protein, 479 aa, synthetic construct
DVQLVESGGGLVQPGGSLRLSCAASGSIFRFPPMGWYRQAPGKQREQVAQLTSGGSTNYADSVKGRFTISRDNAKNTWYLQMNSLRPEDTAVYYCSVLGRDRVTYWGQGTQVTVPAGGGGSGGGGSGGGGSDVQLVESGGGLVQPGGSLRLSCAASGSIFRFPPMGWYRQAPGKQREQVAQLTSGGSTNYADSVKGRFTISRDNAKNTWYLQMNSLRPEDTAVYYCSVLGRDRVTYWGQGTQVTVPAGGGGSDKTHTCPPCPAPEAAGGPSVFLFPPKPKDTLMISRTPEVTCVVVDVSHEDPEVKFNWYVDGVEVHNAKTKPREEQYNSTYRVVSVLTVLHQDWLNGKEYKCKVSNKALAAPIEKTISKAKGQPREPQVYTLPPSREEMTKNQVSLTCLVKGFYPSDIAVEWESNGQPENNYKTTPPVLDSDGSFFLYSKLTVDKSRWQQGNVFSCSVMHEALHNHYTQKSLSLSPGK

SEQ ID NO: 4688 - protein, 479 aa, synthetic construct
DVQLVESGGGLVQPGGSLRLSCAASGSIFRFPPMGWYRQAPGKQREQVAQLTSGGSTNYADSVKGRFTISRDNAKNTWYLQMNSLRPEDTAVYYCSVLGRDIVTYWGQGTQVTVPAGGGGSGGGGSGGGGSDVQLVESGGGLVQPGGSLRLSCAASGSIFRFPPMGWYRQAPGKQREQVAQLTSGGSTNYADSVKGRFTISRDNAKNTWYLQMNSLRPEDTAVYYCSVLGRDIVTYWGQGTQVTVPAGGGGSDKTHTCPPCPAPEAAGGPSVFLFPPKPKDTLMISRTPEVTCVVVDVSHEDPEVKFNWYVDGVEVHNAKTKPREEQYNSTYRVVSVLTVLHQDWLNGKEYKCKVSNKALAAPIEKTISKAKGQPREPQVYTLPPSREEMTKNQVSLTCLVKGFYPSDIAVEWESNGQPENNYKTTPPVLDSDGSFFLYSKLTVDKSRWQQGNVFSCSVMHEALHNHYTQKSLSLSPGK

SEQ ID NO: 4689 - protein, 483 aa, synthetic construct
DVQLLESGGGLVQPGGSLRLSCAASGRTFSDYGMGWFRQAPGKDSEFVAAINWSNARTNYADSVKGRFTISRDNAKNTGYLQMNSLRVEDTAVYYCAAAPSGKAYSYWGQGTQVTVPAGGGGSGGGGSGGGGSDVQLLESGGGLVQPGGSLRLSCAASGRTFSDYGMGWFRQAPGKDSEFVAAINWSNARTNYADSVKGRFTISRDNAKNTGYLQMNSLRVEDTAVYYCAAAPSGKAYSYWGQGTQVTVPAGGGGSDKTHTCPPCPAPEAAGGPSVFLFPPKPKDTLMISRTPEVTCVVVDVSHEDPEVKFNWYVDGVEVHNAKTKPREEQYNSTYRVVSVLTVLHQDWLNGKEYKCKVSNKALAAPIEKTISKAKGQPREPQVYTLPPSREEMTKNQVSLTCLVKGFYPSDIAVEWESNGQPENNYKTTPPVLDSDGSFFLYSKLTVDKSRWQQGNVFSCSVMHEALHNHYTQKSLSLSPGK

SEQ ID NO: 4690 - protein, 483 aa, synthetic construct
DVQLLESGGGLVQPGGSLRLSCAASGRTFSDYGMGWFRQAPGKDSEFVAAINWSNARTNYADSVKGRFTISRDNAKNTGYLQMNSLRVEDTAVYYCAATASGKAYSYWGQGTQVTVPAGGGGSGGGGSGGGGSDVQLLESGGGLVQPGGSLRLSCAASGRTFSDYGMGWFRQAPGKDSEFVAAINWSNARTNYADSVKGRFTISRDNAKNTGYLQMNSLRVEDTAVYYCAATASGKAYSYWGQGTQVTVPAGGGGSDKTHTCPPCPAPEAAGGPSVFLFPPKPKDTLMISRTPEVTCVVVDVSHEDPEVKFNWYVDGVEVHNAKTKPREEQYNSTYRVVSVLTVLHQDWLNGKEYKCKVSNKALAAPIEKTISKAKGQPREPQVYTLPPSREEMTKNQVSLTCLVKGFYPSDIAVEWESNGQPENNYKTTPPVLDSDGSFFLYSKLTVDKSRWQQGNVFSCSVMHEALHNHYTQKSLSLSPGK

SEQ ID NO: 4691 - protein, 483 aa, synthetic construct
DVQLLESGGGLVQPGGSLRLSCAASGRTFSDYGMGWFRQAPGKDSEFVAAINWSNARTNYADSVKGRFTISRDNAKNTGYLQMNSLRVEDTAVYYCAATPAGKAYSYWGQGTQVTVPAGGGGSGGGGSGGGGSDVQLLESGGGLVQPGGSLRLSCAASGRTFSDYGMGWFRQAPGKDSEFVAAINWSNARTNYADSVKGRFTISRDNAKNTGYLQMNSLRVEDTAVYYCAATPAGKAYSYWGQGTQVTVPAGGGGSDKTHTCPPCPAPEAAGGPSVFLFPPKPKDTLMISRTPEVTCVVVDVSHEDPEVKFNWYVDGVEVHNAKTKPREEQYNSTYRVVSVLTVLHQDWLNGKEYKCKVSNKALAAPIEKTISKAKGQPREPQVYTLPPSREEMTKNQVSLTCLVKGFYPSDIAVEWESNGQPENNYKTTPPVLDSDGSFFLYSKLTVDKSRWQQGNVFSCSVMHEALHNHYTQKSLSLSPGK

SEQ ID NO: 4692 - protein, 483 aa, synthetic construct
DVQLLESGGGLVQPGGSLRLSCAASGRTFSDYGMGWFRQAPGKDSEFVAAINWSNARTNYADSVKGRFTISRDNAKNTGYLQMNSLRVEDTAVYYCAATPSAKAYSYWGQGTQVTVPAGGGGSGGGGSGGGGSDVQLLESGGGLVQPGGSLRLSCAASGRTFSDYGMGWFRQAPGKDSEFVAAINWSNARTNYADSVKGRFTISRDNAKNTGYLQMNSLRVEDTAVYYCAATPSAKAYSYWGQGTQVTVPAGGGGSDKTHTCPPCPAPEAAGGPSVFLFPPKPKDTLMISRTPEVTCVVVDVSHEDPEVKFNWYVDGVEVHNAKTKPREEQYNSTYRVVSVLTVLHQDWLNGKEYKCKVSNKALAAPIEKTISKAKGQPREPQVYTLPPSREEMTKNQVSLTCLVKGFYPSDIAVEWESNGQPENNYKTTPPVLDSDGSFFLYSKLTVDKSRWQQGNVFSCSVMHEALHNHYTQKSLSLSPGK

SEQ ID NO: 4693 - protein, 483 aa, synthetic construct
DVQLLESGGGLVQPGGSLRLSCAASGRTFSDYGMGWFRQAPGKDSEFVAAINWSNARTNYADSVKGRFTISRDNAKNTGYLQMNSLRVEDTAVYYCAATPSGAAYSYWGQGTQVTVPAGGGGSGGGGSGGGGSDVQLLESGGGLVQPGGSLRLSCAASGRTFSDYGMGWFRQAPGKDSEFVAAINWSNARTNYADSVKGRFTISRDNAKNTGYLQMNSLRVEDTAVYYCAATPSGAAYSYWGQGTQVTVPAGGGGSDKTHTCPPCPAPEAAGGPSVFLFPPKPKDTLMISRTPEVTCVVVDVSHEDPEVKFNWYVDGVEVHNAKTKPREEQYNSTYRVVSVLTVLHQDWLNGKEYKCKVSNKALAAPIEKTISKAKGQPREPQVYTLPPSREEMTKNQVSLTCLVKGFYPSDIAVEWESNGQPENNYKTTPPVLDSDGSFFLYSKLTVDKSRWQQGNVFSCSVMHEALHNHYTQKSLSLSPGK

SEQ ID NO: 4694 - protein, 483 aa, synthetic construct
DVQLLESGGGLVQPGGSLRLSCAASGRTFSDYGMGWFRQAPGKDSEFVAAINWSNARTNYADSVKGRFTISRDNAKNTGYLQMNSLRVEDTAVYYCAATPSGKAASYWGQGTQVTVPAGGGGSGGGGSGGGGSDVQLLESGGGLVQPGGSLRLSCAASGRTFSDYGMGWFRQAPGKDSEFVAAINWSNARTNYADSVKGRFTISRDNAKNTGYLQMNSLRVEDTAVYYCAATPSGKAASYWGQGTQVTVPAGGGGSDKTHTCPPCPAPEAAGGPSVFLFPPKPKDTLMISRTPEVTCVVVDVSHEDPEVKFNWYVDGVEVHNAKTKPREEQYNSTYRVVSVLTVLHQDWLNGKEYKCKVSNKALAAPIEKTISKAKGQPREPQVYTLPPSREEMTKNQVSLTCLVKGFYPSDIAVEWESNGQPENNYKTTPPVLDSDGSFFLYSKLTVDKSRWQQGNVFSCSVMHEALHNHYTQKSLSLSPGK

SEQ ID NO: 4695 - protein, 483 aa, synthetic construct
DVQLLESGGGLVQPGGSLRLSCAASGRTFSDYGMGWFRQAPGKDSEFVAAINWSNARTNYADSVKGRFTISRDNAKNTGYLQMNSLRVEDTAVYYCAATPSGKAYAYWGQGTQVTVPAGGGGSGGGGSGGGGSDVQLLESGGGLVQPGGSLRLSCAASGRTFSDYGMGWFRQAPGKDSEFVAAINWSNARTNYADSVKGRFTISRDNAKNTGYLQMNSLRVEDTAVYYCAATPSGKAYAYWGQGTQVTVPAGGGGSDKTHTCPPCPAPEAAGGPSVFLFPPKPKDTLMISRTPEVTCVVVDVSHEDPEVKFNWYVDGVEVHNAKTKPREEQYNSTYRVVSVLTVLHQDWLNGKEYKCKVSNKALAAPIEKTISKAKGQPREPQVYTLPPSREEMTKNQVSLTCLVKGFYPSDIAVEWESNGQPENNYKTTPPVLDSDGSFFLYSKLTVDKSRWQQGNVFSCSVMHEALHNHYTQKSLSLSPGK

SEQ ID NO: 4696 - protein, 483 aa, synthetic construct
DVQLLESGGGLVQPGGSLRLSCAASGRTFSDYGMGWFRQAPGKDSEFVAAINWSNARTNYADSVKGRFTISRDNAKNTGYLQMNSLRVEDTAVYYCAATPSGKAYSAWGQGTQVTVPAGGGGSGGGGSGGGGSDVQLLESGGGLVQPGGSLRLSCAASGRTFSDYGMGWFRQAPGKDSEFVAAINWSNARTNYADSVKGRFTISRDNAKNTGYLQMNSLRVEDTAVYYCAATPSGKAYSAWGQGTQVTVPAGGGGSDKTHTCPPCPAPEAAGGPSVFLFPPKPKDTLMISRTPEVTCVVVDVSHEDPEVKFNWYVDGVEVHNAKTKPREEQYNSTYRVVSVLTVLHQDWLNGKEYKCKVSNKALAAPIEKTISKAKGQPREPQVYTLPPSREEMTKNQVSLTCLVKGFYPSDIAVEWESNGQPENNYKTTPPVLDSDGSFFLYSKLTVDKSRWQQGNVFSCSVMHEALHNHYTQKSLSLSPGK

SEQ ID NO: 4697 - protein, 4 aa, synthetic construct
VAGG

SEQ ID NO: 4698 - protein, 4 aa, synthetic construct
VPAG

SEQ ID NO: 4699 - protein, 8 aa, synthetic construct
  VARIANT 6: note = G or A
INWSNXRT

SEQ ID NO: 4700 - skipped

SEQ ID NO: 4701 - protein, 14 aa, synthetic construct
  VARIANT 4: note = S or A
  VARIANT 13: note = V or T
YYQXLSSPNYGQXF

SEQ ID NO: 4702 - protein, 16 aa, synthetic construct
  VARIANT 11: note = V or T
AADSDLSTVVXGPHDY

SEQ ID NO: 4703 - protein, 11 aa, synthetic construct
  VARIANT 3: note = T or A
AAXPSGKAYSY

SEQ ID NO: 4704 - protein, 12 aa, synthetic construct
  VARIANT 4: note = G or R
  VARIANT 6: note = T or A
  VARIANT 11: note = N or G
ARVXGXPYEYXY

SEQ ID NO: 4705 - protein, 8 aa, synthetic construct
  VARIANT 5: note = G or S
  VARIANT 7: note = Y or L
  VARIANT 8: note = T or F
GRTFXSXX

SEQ ID NO: 4706 - protein, 10 aa, synthetic construct
  VARIANT 8: note = M or V
SVLGRDMXTY

SEQ ID NO: 4707 - protein, 11 aa, synthetic construct
  VARIANT 1: note = A or V
  VARIANT 3: note = A or S
  VARIANT 10: note = T or N
XAXPTGRAFXY

SEQ ID NO: 4708 - protein, 8 aa, synthetic construct
  VARIANT 3: note = T or I
GSXFRFPP

SEQ ID NO: 4709 - protein, 485 aa, synthetic construct
EVQLLESGGGLVQPGGSLRLSCAASGRTFSDYGMGWFRQAPGKDSEFVAAINWSNARTNYADSVKGRFTISRDNAKNTGYLQMNSLRVEDTAVYYCAAAPSGKAYSYWGQGTQVTVSSGGGGSGGGGSGGGGSEVQLLESGGGLVQPGGSLRLSCAASGRTFSDYGMGWFRQAPGKDSEFVAAINWSNARTNYADSVKGRFTISRDNAKNTGYLQMNSLRVEDTAVYYCAAAPSGKAYSYWGQGTQVTVSSGGGGSESKYGPPCPPCPAPEFEGGPSVFLFPPKPKDTLMISRTPEVTCVVVDVSQEDPEVQFNWYVDGVEVHNAKTKPREEQFNSTYRVVSVLTVLHQDWLNGKEYKCKVSNKGLPSSIEKTISKAKGQPREPQVYTLPPSQEEMTKNQVSLTCLVKGFYPSDIAVEWESNGQPENNYKTTPPVLDSDGSFFLYSRLTVDKSRWQEGNVFSCSVMHEALHNHYTQKSLSLSLGK

SEQ ID NO: 4710 - protein, 483 aa, synthetic construct
EVQLLESGGGLVQPGGSLRLSCAASGRTFSDYGMGWFRQAPGKDSEFVAAINWSNARTNYADSVKGRFTISRDNAKNTGYLQMNSLRVEDTAVYYCAAAPSGKAYSYWGQGTQVTVSSGGGGSGGGGSGGGGSEVQLLESGGGLVQPGGSLRLSCAASGRTFSDYGMGWFRQAPGKDSEFVAAINWSNARTNYADSVKGRFTISRDNAKNTGYLQMNSLRVEDTAVYYCAAAPSGKAYSYWGQGTQVTVSSGGGGSDKTHTCPPCPAPEAAGGPSVFLFPPKPKDTLMISRTPEVTCVVVDVSHEDPEVKFNWYVDGVEVHNAKTKPREEQYNSTYRVVSVLTVLHQDWLNGKEYKCKVSNKALAAPIEKTISKAKGQPREPQVYTLPPSREEMTKNQVSLTCLVKGFYPSDIAVEWESNGQPENNYKTTPPVLDSDGSFFLYSKLTVDKSRWQQGNVFSCSVMHEALHNHYTQKSLSLSPGK

SEQ ID NO: 4711 - protein, 485 aa, synthetic construct
DVQLLESGGGLVQPGGSLRLSCAASGRTFSDYGMGWFRQAPGKDSEFVAAINWSNARTNYADSVKGRFTISRDNAKNTGYLQMNSLRVEDTAVYYCAAAPSGKAYSYWGQGTQVTVSSGGGGSGGGGSGGGGSDVQLLESGGGLVQPGGSLRLSCAASGRTFSDYGMGWFRQAPGKDSEFVAAINWSNARTNYADSVKGRFTISRDNAKNTGYLQMNSLRVEDTAVYYCAAAPSGKAYSYWGQGTQVTVSSGGGGSESKYGPPCPPCPAPEFEGGPSVFLFPPKPKDTLMISRTPEVTCVVVDVSQEDPEVQFNWYVDGVEVHNAKTKPREEQFNSTYRVVSVLTVLHQDWLNGKEYKCKVSNKGLPSSIEKTISKAKGQPREPQVYTLPPSQEEMTKNQVSLTCLVKGFYPSDIAVEWESNGQPENNYKTTPPVLDSDGSFFLYSRLTVDKSRWQEGNVFSCSVMHEALHNHYTQKSLSLSLGK

SEQ ID NO: 4712 - protein, 483 aa, synthetic construct
DVQLLESGGGLVQPGGSLRLSCAASGRTFSDYGMGWFRQAPGKDSEFVAAINWSNARTNYADSVKGRFTISRDNAKNTGYLQMNSLRVEDTAVYYCAAAPSGKAYSYWGQGTQVTVSSGGGGSGGGGSGGGGSDVQLLESGGGLVQPGGSLRLSCAASGRTFSDYGMGWFRQAPGKDSEFVAAINWSNARTNYADSVKGRFTISRDNAKNTGYLQMNSLRVEDTAVYYCAAAPSGKAYSYWGQGTQVTVSSGGGGSDKTHTCPPCPAPEAAGGPSVFLFPPKPKDTLMISRTPEVTCVVVDVSHEDPEVKFNWYVDGVEVHNAKTKPREEQYNSTYRVVSVLTVLHQDWLNGKEYKCKVSNKALAAPIEKTISKAKGQPREPQVYTLPPSREEMTKNQVSLTCLVKGFYPSDIAVEWESNGQPENNYKTTPPVLDSDGSFFLYSKLTVDKSRWQQGNVFSCSVMHEALHNHYTQKSLSLSPGK

SEQ ID NO: 4713 - protein, 485 aa, synthetic construct
EVQLLESGGGLVQPGGSLRLSCAASGRTFSDYGMGWFRQAPGKDSEFVAAINWSNARTNYADSVKGRFTISRDNAKNTGYLQMNSLRVEDTAVYYCAAAPSGKAYSYWGQGTQVTVPAGGGGSGGGGSGGGGSEVQLLESGGGLVQPGGSLRLSCAASGRTFSDYGMGWFRQAPGKDSEFVAAINWSNARTNYADSVKGRFTISRDNAKNTGYLQMNSLRVEDTAVYYCAAAPSGKAYSYWGQGTQVTVPAGGGGSESKYGPPCPPCPAPEFEGGPSVFLFPPKPKDTLMISRTPEVTCVVVDVSQEDPEVQFNWYVDGVEVHNAKTKPREEQFNSTYRVVSVLTVLHQDWLNGKEYKCKVSNKGLPSSIEKTISKAKGQPREPQVYTLPPSQEEMTKNQVSLTCLVKGFYPSDIAVEWESNGQPENNYKTTPPVLDSDGSFFLYSRLTVDKSRWQEGNVFSCSVMHEALHNHYTQKSLSLSLGK

SEQ ID NO: 4714 - protein, 483 aa, synthetic construct
EVQLLESGGGLVQPGGSLRLSCAASGRTFSDYGMGWFRQAPGKDSEFVAAINWSNARTNYADSVKGRFTISRDNAKNTGYLQMNSLRVEDTAVYYCAAAPSGKAYSYWGQGTQVTVPAGGGGSGGGGSGGGGSEVQLLESGGGLVQPGGSLRLSCAASGRTFSDYGMGWFRQAPGKDSEFVAAINWSNARTNYADSVKGRFTISRDNAKNTGYLQMNSLRVEDTAVYYCAAAPSGKAYSYWGQGTQVTVPAGGGGSDKTHTCPPCPAPEAAGGPSVFLFPPKPKDTLMISRTPEVTCVVVDVSHEDPEVKFNWYVDGVEVHNAKTKPREEQYNSTYRVVSVLTVLHQDWLNGKEYKCKVSNKALAAPIEKTISKAKGQPREPQVYTLPPSREEMTKNQVSLTCLVKGFYPSDIAVEWESNGQPENNYKTTPPVLDSDGSFFLYSKLTVDKSRWQQGNVFSCSVMHEALHNHYTQKSLSLSPGK

SEQ ID NO: 4715 - protein, 485 aa, synthetic construct
DVQLLESGGGLVQPGGSLRLSCAASGRTFSDYGMGWFRQAPGKDSEFVAAINWSNARTNYADSVKGRFTISRDNAKNTGYLQMNSLRVEDTAVYYCAAAPSGKAYSYWGQGTQVTVPAGGGGSGGGGSGGGGSDVQLLESGGGLVQPGGSLRLSCAASGRTFSDYGMGWFRQAPGKDSEFVAAINWSNARTNYADSVKGRFTISRDNAKNTGYLQMNSLRVEDTAVYYCAAAPSGKAYSYWGQGTQVTVPAGGGGSESKYGPPCPPCPAPEFEGGPSVFLFPPKPKDTLMISRTPEVTCVVVDVSQEDPEVQFNWYVDGVEVHNAKTKPREEQFNSTYRVVSVLTVLHQDWLNGKEYKCKVSNKGLPSSIEKTISKAKGQPREPQVYTLPPSQEEMTKNQVSLTCLVKGFYPSDIAVEWESNGQPENNYKTTPPVLDSDGSFFLYSRLTVDKSRWQEGNVFSCSVMHEALHNHYTQKSLSLSLGK

SEQ ID NO: 4716 - protein, 485 aa, synthetic construct
DVQLLESGGGLVQPGGSLRLSCAASGRTFSDYGMGWFRQAPGKDSEFVAAINWSNARTNYADSVKGRFTISRDNAKNTGYLQMNSLRVEDTAVYYCAAAPSGKAYSYWGQGTQVTVAGGGGGSGGGGSGGGGSDVQLLESGGGLVQPGGSLRLSCAASGRTFSDYGMGWFRQAPGKDSEFVAAINWSNARTNYADSVKGRFTISRDNAKNTGYLQMNSLRVEDTAVYYCAAAPSGKAYSYWGQGTQVTVAGGGGGSESKYGPPCPPCPAPEFEGGPSVFLFPPKPKDTLMISRTPEVTCVVVDVSQEDPEVQFNWYVDGVEVHNAKTKPREEQFNSTYRVVSVLTVLHQDWLNGKEYKCKVSNKGLPSSIEKTISKAKGQPREPQVYTLPPSQEEMTKNQVSLTCLVKGFYPSDIAVEWESNGQPENNYKTTPPVLDSDGSFFLYSRLTVDKSRWQEGNVFSCSVMHEALHNHYTQKSLSLSLGK

SEQ ID NO: 4717 - protein, 6 aa, synthetic construct
HHHHHH

SEQ ID NO: 4718 - protein, 5 aa, synthetic construct
PAPAP

SEQ ID NO: 4719 - protein, 8 aa, synthetic construct
GRTFSDYG

SEQ ID NO: 4720 - protein, 8 aa, synthetic construct
GRTFSDYG

SEQ ID NO: 4721 - protein, 8 aa, synthetic construct
GRTFSDYG

SEQ ID NO: 4722 - protein, 8 aa, synthetic construct
GRTFSDYG

SEQ ID NO: 4723 - protein, 8 aa, synthetic construct
INWSNGRT

SEQ ID NO: 4724 - protein, 8 aa, synthetic construct
INWSNGRT

SEQ ID NO: 4725 - protein, 8 aa, synthetic construct
INWSNGRT

SEQ ID NO: 4726 - protein, 8 aa, synthetic construct
INWSNGRT

SEQ ID NO: 4727 - protein, 11 aa, synthetic construct
AATPTGKAYTY

SEQ ID NO: 4728 - protein, 11 aa, synthetic construct
AATPTGKAYTY

SEQ ID NO: 4729 - protein, 11 aa, synthetic construct
AGTLSGKAYTY

SEQ ID NO: 4730 - protein, 11 aa, synthetic construct
AGTLSGKAYTY

SEQ ID NO: 4731 - protein, 118 aa, synthetic construct; identical to SEQ ID NO: 939

SEQ ID NO: 4732 - protein, 118 aa, synthetic construct
EVQLLESGGGLVQPGGSLRLSCAASGRTFSDYGMGWFRQAPGKEREFVATINWSNARTTYADSVKGRFTISRDNAKNTGYLQMNSLRVEDTAVYYCAATPTGKAYTYWGQGTQVTVSS

SEQ ID NO: 4733 - protein, 118 aa, synthetic construct; identical to SEQ ID NO: 942

SEQ ID NO: 4734 - protein, 118 aa, synthetic construct
EVQLLESGGGLVQPGGSLRLSCAASGRTFSDYGMGWFRQAPGKEHEFVASINWSNARTSYADSAKGRFTISRDNAKNTGYLQMNSLRVEDTAVYYCAGTLSGKAYTYWGQGTQVTVSS

SEQ ID NO: 4735 - protein, 485 aa, synthetic construct
EVQLLESGGGLVQPGGSLRLSCAASGRTFSDYGMGWFRQAPGKEREFVATINWSNGRTTYADSVKGRFTISRDNAKNTGYLQMNSLRVEDTAVYYCAATPTGKAYTYWGQGTQVTVSSGGGGSGGGGSGGGGSEVQLLESGGGLVQPGGSLRLSCAASGRTFSDYGMGWFRQAPGKEREFVATINWSNGRTTYADSVKGRFTISRDNAKNTGYLQMNSLRVEDTAVYYCAATPTGKAYTYWGQGTQVTVSSGGGGSESKYGPPCPPCPAPEFEGGPSVFLFPPKPKDTLMISRTPEVTCVVVDVSQEDPEVQFNWYVDGVEVHNAKTKPREEQFNSTYRVVSVLTVLHQDWLNGKEYKCKVSNKGLPSSIEKTISKAKGQPREPQVYTLPPSQEEMTKNQVSLTCLVKGFYPSDIAVEWESNGQPENNYKTTPPVLDSDGSFFLYSRLTVDKSRWQEGNVFSCSVMHEALHNHYTQKSLSLSLGK

SEQ ID NO: 4736 - protein, 483 aa, synthetic construct
EVQLLESGGGLVQPGGSLRLSCAASGRTFSDYGMGWFRQAPGKEREFVATINWSNGRTTYADSVKGRFTISRDNAKNTGYLQMNSLRVEDTAVYYCAATPTGKAYTYWGQGTQVTVSSGGGGSGGGGSGGGGSEVQLLESGGGLVQPGGSLRLSCAASGRTFSDYGMGWFRQAPGKEREFVATINWSNGRTTYADSVKGRFTISRDNAKNTGYLQMNSLRVEDTAVYYCAATPTGKAYTYWGQGTQVTVSSGGGGSDKTHTCPPCPAPEAAGGPSVFLFPPKPKDTLMISRTPEVTCVVVDVSHEDPEVKFNWYVDGVEVHNAKTKPREEQYNSTYRVVSVLTVLHQDWLNGKEYKCKVSNKALAAPIEKTISKAKGQPREPQVYTLPPSREEMTKNQVSLTCLVKGFYPSDIAVEWESNGQPENNYKTTPPVLDSDGSFFLYSKLTVDKSRWQQGNVFSCSVMHEALHNHYTQKSLSLSPGK

SEQ ID NO: 4737 - protein, 485 aa, synthetic construct
DVQLLESGGGLVQPGGSLRLSCAASGRTFSDYGMGWFRQAPGKEREFVATINWSNGRTTYADSVKGRFTISRDNAKNTGYLQMNSLRVEDTAVYYCAATPTGKAYTYWGQGTQVTVSSGGGGSGGGGSGGGGSDVQLLESGGGLVQPGGSLRLSCAASGRTFSDYGMGWFRQAPGKEREFVATINWSNGRTTYADSVKGRFTISRDNAKNTGYLQMNSLRVEDTAVYYCAATPTGKAYTYWGQGTQVTVSSGGGGSESKYGPPCPPCPAPEFEGGPSVFLFPPKPKDTLMISRTPEVTCVVVDVSQEDPEVQFNWYVDGVEVHNAKTKPREEQFNSTYRVVSVLTVLHQDWLNGKEYKCKVSNKGLPSSIEKTISKAKGQPREPQVYTLPPSQEEMTKNQVSLTCLVKGFYPSDIAVEWESNGQPENNYKTTPPVLDSDGSFFLYSRLTVDKSRWQEGNVFSCSVMHEALHNHYTQKSLSLSLGK

SEQ ID NO: 4738 - protein, 483 aa, synthetic construct
DVQLLESGGGLVQPGGSLRLSCAASGRTFSDYGMGWFRQAPGKEREFVATINWSNGRTTYADSVKGRFTISRDNAKNTGYLQMNSLRVEDTAVYYCAATPTGKAYTYWGQGTQVTVSSGGGGSGGGGSGGGGSDVQLLESGGGLVQPGGSLRLSCAASGRTFSDYGMGWFRQAPGKEREFVATINWSNGRTTYADSVKGRFTISRDNAKNTGYLQMNSLRVEDTAVYYCAATPTGKAYTYWGQGTQVTVSSGGGGSDKTHTCPPCPAPEAAGGPSVFLFPPKPKDTLMISRTPEVTCVVVDVSHEDPEVKFNWYVDGVEVHNAKTKPREEQYNSTYRVVSVLTVLHQDWLNGKEYKCKVSNKALAAPIEKTISKAKGQPREPQVYTLPPSREEMTKNQVSLTCLVKGFYPSDIAVEWESNGQPENNYKTTPPVLDSDGSFFLYSKLTVDKSRWQQGNVFSCSVMHEALHNHYTQKSLSLSPGK

SEQ ID NO: 4739 - protein, 485 aa, synthetic construct
EVQLLESGGGLVQPGGSLRLSCAASGRTFSDYGMGWFRQAPGKEREFVATINWSNGRTTYADSVKGRFTISRDNAKNTGYLQMNSLRVEDTAVYYCAATPTGKAYTYWGQGTQVTVPAGGGGSGGGGSGGGGSEVQLLESGGGLVQPGGSLRLSCAASGRTFSDYGMGWFRQAPGKEREFVATINWSNGRTTYADSVKGRFTISRDNAKNTGYLQMNSLRVEDTAVYYCAATPTGKAYTYWGQGTQVTVPAGGGGSESKYGPPCPPCPAPEFEGGPSVFLFPPKPKDTLMISRTPEVTCVVVDVSQEDPEVQFNWYVDGVEVHNAKTKPREEQFNSTYRVVSVLTVLHQDWLNGKEYKCKVSNKGLPSSIEKTISKAKGQPREPQVYTLPPSQEEMTKNQVSLTCLVKGFYPSDIAVEWESNGQPENNYKTTPPVLDSDGSFFLYSRLTVDKSRWQEGNVFSCSVMHEALHNHYTQKSLSLSLGK

SEQ ID NO: 4740 - protein, 483 aa, synthetic construct
EVQLLESGGGLVQPGGSLRLSCAASGRTFSDYGMGWFRQAPGKEREFVATINWSNGRTTYADSVKGRFTISRDNAKNTGYLQMNSLRVEDTAVYYCAATPTGKAYTYWGQGTQVTVPAGGGGSGGGGSGGGGSEVQLLESGGGLVQPGGSLRLSCAASGRTFSDYGMGWFRQAPGKEREFVATINWSNGRTTYADSVKGRFTISRDNAKNTGYLQMNSLRVEDTAVYYCAATPTGKAYTYWGQGTQVTVPAGGGGSDKTHTCPPCPAPEAAGGPSVFLFPPKPKDTLMISRTPEVTCVVVDVSHEDPEVKFNWYVDGVEVHNAKTKPREEQYNSTYRVVSVLTVLHQDWLNGKEYKCKVSNKALAAPIEKTISKAKGQPREPQVYTLPPSREEMTKNQVSLTCLVKGFYPSDIAVEWESNGQPENNYKTTPPVLDSDGSFFLYSKLTVDKSRWQQGNVFSCSVMHEALHNHYTQKSLSLSPGK

SEQ ID NO: 4741 - protein, 485 aa, synthetic construct
DVQLLESGGGLVQPGGSLRLSCAASGRTFSDYGMGWFRQAPGKEREFVATINWSNGRTTYADSVKGRFTISRDNAKNTGYLQMNSLRVEDTAVYYCAATPTGKAYTYWGQGTQVTVPAGGGGSGGGGSGGGGSDVQLLESGGGLVQPGGSLRLSCAASGRTFSDYGMGWFRQAPGKEREFVATINWSNGRTTYADSVKGRFTISRDNAKNTGYLQMNSLRVEDTAVYYCAATPTGKAYTYWGQGTQVTVPAGGGGSESKYGPPCPPCPAPEFEGGPSVFLFPPKPKDTLMISRTPEVTCVVVDVSQEDPEVQFNWYVDGVEVHNAKTKPREEQFNSTYRVVSVLTVLHQDWLNGKEYKCKVSNKGLPSSIEKTISKAKGQPREPQVYTLPPSQEEMTKNQVSLTCLVKGFYPSDIAVEWESNGQPENNYKTTPPVLDSDGSFFLYSRLTVDKSRWQEGNVFSCSVMHEALHNHYTQKSLSLSLGK

SEQ ID NO: 4742 - protein, 483 aa, synthetic construct
DVQLLESGGGLVQPGGSLRLSCAASGRTFSDYGMGWFRQAPGKEREFVATINWSNGRTTYADSVKGRFTISRDNAKNTGYLQMNSLRVEDTAVYYCAATPTGKAYTYWGQGTQVTVPAGGGGSGGGGSGGGGSDVQLLESGGGLVQPGGSLRLSCAASGRTFSDYGMGWFRQAPGKEREFVATINWSNGRTTYADSVKGRFTISRDNAKNTGYLQMNSLRVEDTAVYYCAATPTGKAYTYWGQGTQVTVPAGGGGSDKTHTCPPCPAPEAAGGPSVFLFPPKPKDTLMISRTPEVTCVVVDVSHEDPEVKFNWYVDGVEVHNAKTKPREEQYNSTYRVVSVLTVLHQDWLNGKEYKCKVSNKALAAPIEKTISKAKGQPREPQVYTLPPSREEMTKNQVSLTCLVKGFYPSDIAVEWESNGQPENNYKTTPPVLDSDGSFFLYSKLTVDKSRWQQGNVFSCSVMHEALHNHYTQKSLSLSPGK

SEQ ID NO: 4743 - protein, 485 aa, synthetic construct
DVQLLESGGGLVQPGGSLRLSCAASGRTFSDYGMGWFRQAPGKEREFVATINWSNGRTTYADSVKGRFTISRDNAKNTGYLQMNSLRVEDTAVYYCAATPTGKAYTYWGQGTQVTVAGGGGGSGGGGSGGGGSDVQLLESGGGLVQPGGSLRLSCAASGRTFSDYGMGWFRQAPGKEREFVATINWSNGRTTYADSVKGRFTISRDNAKNTGYLQMNSLRVEDTAVYYCAATPTGKAYTYWGQGTQVTVAGGGGGSESKYGPPCPPCPAPEFEGGPSVFLFPPKPKDTLMISRTPEVTCVVVDVSQEDPEVQFNWYVDGVEVHNAKTKPREEQFNSTYRVVSVLTVLHQDWLNGKEYKCKVSNKGLPSSIEKTISKAKGQPREPQVYTLPPSQEEMTKNQVSLTCLVKGFYPSDIAVEWESNGQPENNYKTTPPVLDSDGSFFLYSRLTVDKSRWQEGNVFSCSVMHEALHNHYTQKSLSLSLGK

SEQ ID NO: 4744 - protein, 485 aa, synthetic construct
EVQLLESGGGLVQPGGSLRLSCAASGRTFSDYGMGWFRQAPGKEREFVATINWSNARTTYADSVKGRFTISRDNAKNTGYLQMNSLRVEDTAVYYCAATPTGKAYTYWGQGTQVTVSSGGGGSGGGGSGGGGSEVQLLESGGGLVQPGGSLRLSCAASGRTFSDYGMGWFRQAPGKEREFVATINWSNARTTYADSVKGRFTISRDNAKNTGYLQMNSLRVEDTAVYYCAATPTGKAYTYWGQGTQVTVSSGGGGSESKYGPPCPPCPAPEFEGGPSVFLFPPKPKDTLMISRTPEVTCVVVDVSQEDPEVQFNWYVDGVEVHNAKTKPREEQFNSTYRVVSVLTVLHQDWLNGKEYKCKVSNKGLPSSIEKTISKAKGQPREPQVYTLPPSQEEMTKNQVSLTCLVKGFYPSDIAVEWESNGQPENNYKTTPPVLDSDGSFFLYSRLTVDKSRWQEGNVFSCSVMHEALHNHYTQKSLSLSLGK

SEQ ID NO: 4745 - protein, 483 aa, synthetic construct
EVQLLESGGGLVQPGGSLRLSCAASGRTFSDYGMGWFRQAPGKEREFVATINWSNARTTYADSVKGRFTISRDNAKNTGYLQMNSLRVEDTAVYYCAATPTGKAYTYWGQGTQVTVSSGGGGSGGGGSGGGGSEVQLLESGGGLVQPGGSLRLSCAASGRTFSDYGMGWFRQAPGKEREFVATINWSNARTTYADSVKGRFTISRDNAKNTGYLQMNSLRVEDTAVYYCAATPTGKAYTYWGQGTQVTVSSGGGGSDKTHTCPPCPAPEAAGGPSVFLFPPKPKDTLMISRTPEVTCVVVDVSHEDPEVKFNWYVDGVEVHNAKTKPREEQYNSTYRVVSVLTVLHQDWLNGKEYKCKVSNKALAAPIEKTISKAKGQPREPQVYTLPPSREEMTKNQVSLTCLVKGFYPSDIAVEWESNGQPENNYKTTPPVLDSDGSFFLYSKLTVDKSRWQQGNVFSCSVMHEALHNHYTQKSLSLSPGK

SEQ ID NO: 4746 - protein, 485 aa, synthetic construct
DVQLLESGGGLVQPGGSLRLSCAASGRTFSDYGMGWFRQAPGKEREFVATINWSNARTTYADSVKGRFTISRDNAKNTGYLQMNSLRVEDTAVYYCAATPTGKAYTYWGQGTQVTVSSGGGGSGGGGSGGGGSDVQLLESGGGLVQPGGSLRLSCAASGRTFSDYGMGWFRQAPGKEREFVATINWSNARTTYADSVKGRFTISRDNAKNTGYLQMNSLRVEDTAVYYCAATPTGKAYTYWGQGTQVTVSSGGGGSESKYGPPCPPCPAPEFEGGPSVFLFPPKPKDTLMISRTPEVTCVVVDVSQEDPEVQFNWYVDGVEVHNAKTKPREEQFNSTYRVVSVLTVLHQDWLNGKEYKCKVSNKGLPSSIEKTISKAKGQPREPQVYTLPPSQEEMTKNQVSLTCLVKGFYPSDIAVEWESNGQPENNYKTTPPVLDSDGSFFLYSRLTVDKSRWQEGNVFSCSVMHEALHNHYTQKSLSLSLGK

SEQ ID NO: 4747 - protein, 483 aa, synthetic construct
DVQLLESGGGLVQPGGSLRLSCAASGRTFSDYGMGWFRQAPGKEREFVATINWSNARTTYADSVKGRFTISRDNAKNTGYLQMNSLRVEDTAVYYCAATPTGKAYTYWGQGTQVTVSSGGGGSGGGGSGGGGSDVQLLESGGGLVQPGGSLRLSCAASGRTFSDYGMGWFRQAPGKEREFVATINWSNARTTYADSVKGRFTISRDNAKNTGYLQMNSLRVEDTAVYYCAATPTGKAYTYWGQGTQVTVSSGGGGSDKTHTCPPCPAPEAAGGPSVFLFPPKPKDTLMISRTPEVTCVVVDVSHEDPEVKFNWYVDGVEVHNAKTKPREEQYNSTYRVVSVLTVLHQDWLNGKEYKCKVSNKALAAPIEKTISKAKGQPREPQVYTLPPSREEMTKNQVSLTCLVKGFYPSDIAVEWESNGQPENNYKTTPPVLDSDGSFFLYSKLTVDKSRWQQGNVFSCSVMHEALHNHYTQKSLSLSPGK

SEQ ID NO: 4748 - protein, 485 aa, synthetic construct
EVQLLESGGGLVQPGGSLRLSCAASGRTFSDYGMGWFRQAPGKEREFVATINWSNARTTYADSVKGRFTISRDNAKNTGYLQMNSLRVEDTAVYYCAATPTGKAYTYWGQGTQVTVPAGGGGSGGGGSGGGGSEVQLLESGGGLVQPGGSLRLSCAASGRTFSDYGMGWFRQAPGKEREFVATINWSNARTTYADSVKGRFTISRDNAKNTGYLQMNSLRVEDTAVYYCAATPTGKAYTYWGQGTQVTVPAGGGGSESKYGPPCPPCPAPEFEGGPSVFLFPPKPKDTLMISRTPEVTCVVVDVSQEDPEVQFNWYVDGVEVHNAKTKPREEQFNSTYRVVSVLTVLHQDWLNGKEYKCKVSNKGLPSSIEKTISKAKGQPREPQVYTLPPSQEEMTKNQVSLTCLVKGFYPSDIAVEWESNGQPENNYKTTPPVLDSDGSFFLYSRLTVDKSRWQEGNVFSCSVMHEALHNHYTQKSLSLSLGK

SEQ ID NO: 4749 - protein, 483 aa, synthetic construct
EVQLLESGGGLVQPGGSLRLSCAASGRTFSDYGMGWFRQAPGKEREFVATINWSNARTTYADSVKGRFTISRDNAKNTGYLQMNSLRVEDTAVYYCAATPTGKAYTYWGQGTQVTVPAGGGGSGGGGSGGGGSEVQLLESGGGLVQPGGSLRLSCAASGRTFSDYGMGWFRQAPGKEREFVATINWSNARTTYADSVKGRFTISRDNAKNTGYLQMNSLRVEDTAVYYCAATPTGKAYTYWGQGTQVTVPAGGGGSDKTHTCPPCPAPEAAGGPSVFLFPPKPKDTLMISRTPEVTCVVVDVSHEDPEVKFNWYVDGVEVHNAKTKPREEQYNSTYRVVSVLTVLHQDWLNGKEYKCKVSNKALAAPIEKTISKAKGQPREPQVYTLPPSREEMTKNQVSLTCLVKGFYPSDIAVEWESNGQPENNYKTTPPVLDSDGSFFLYSKLTVDKSRWQQGNVFSCSVMHEALHNHYTQKSLSLSPGK

SEQ ID NO: 4750 - protein, 485 aa, synthetic construct
DVQLLESGGGLVQPGGSLRLSCAASGRTFSDYGMGWFRQAPGKEREFVATINWSNARTTYADSVKGRFTISRDNAKNTGYLQMNSLRVEDTAVYYCAATPTGKAYTYWGQGTQVTVPAGGGGSGGGGSGGGGSDVQLLESGGGLVQPGGSLRLSCAASGRTFSDYGMGWFRQAPGKEREFVATINWSNARTTYADSVKGRFTISRDNAKNTGYLQMNSLRVEDTAVYYCAATPTGKAYTYWGQGTQVTVPAGGGGSESKYGPPCPPCPAPEFEGGPSVFLFPPKPKDTLMISRTPEVTCVVVDVSQEDPEVQFNWYVDGVEVHNAKTKPREEQFNSTYRVVSVLTVLHQDWLNGKEYKCKVSNKGLPSSIEKTISKAKGQPREPQVYTLPPSQEEMTKNQVSLTCLVKGFYPSDIAVEWESNGQPENNYKTTPPVLDSDGSFFLYSRLTVDKSRWQEGNVFSCSVMHEALHNHYTQKSLSLSLGK

SEQ ID NO: 4751 - protein, 483 aa, synthetic construct
DVQLLESGGGLVQPGGSLRLSCAASGRTFSDYGMGWFRQAPGKEREFVATINWSNARTTYADSVKGRFTISRDNAKNTGYLQMNSLRVEDTAVYYCAATPTGKAYTYWGQGTQVTVPAGGGGSGGGGSGGGGSDVQLLESGGGLVQPGGSLRLSCAASGRTFSDYGMGWFRQAPGKEREFVATINWSNARTTYADSVKGRFTISRDNAKNTGYLQMNSLRVEDTAVYYCAATPTGKAYTYWGQGTQVTVPAGGGGSDKTHTCPPCPAPEAAGGPSVFLFPPKPKDTLMISRTPEVTCVVVDVSHEDPEVKFNWYVDGVEVHNAKTKPREEQYNSTYRVVSVLTVLHQDWLNGKEYKCKVSNKALAAPIEKTISKAKGQPREPQVYTLPPSREEMTKNQVSLTCLVKGFYPSDIAVEWESNGQPENNYKTTPPVLDSDGSFFLYSKLTVDKSRWQQGNVFSCSVMHEALHNHYTQKSLSLSPGK

SEQ ID NO: 4752 - protein, 485 aa, synthetic construct
DVQLLESGGGLVQPGGSLRLSCAASGRTFSDYGMGWFRQAPGKEREFVATINWSNARTTYADSVKGRFTISRDNAKNTGYLQMNSLRVEDTAVYYCAATPTGKAYTYWGQGTQVTVAGGGGGSGGGGSGGGGSDVQLLESGGGLVQPGGSLRLSCAASGRTFSDYGMGWFRQAPGKEREFVATINWSNARTTYADSVKGRFTISRDNAKNTGYLQMNSLRVEDTAVYYCAATPTGKAYTYWGQGTQVTVAGGGGGSESKYGPPCPPCPAPEFEGGPSVFLFPPKPKDTLMISRTPEVTCVVVDVSQEDPEVQFNWYVDGVEVHNAKTKPREEQFNSTYRVVSVLTVLHQDWLNGKEYKCKVSNKGLPSSIEKTISKAKGQPREPQVYTLPPSQEEMTKNQVSLTCLVKGFYPSDIAVEWESNGQPENNYKTTPPVLDSDGSFFLYSRLTVDKSRWQEGNVFSCSVMHEALHNHYTQKSLSLSLGK

SEQ ID NO: 4753 - protein, 485 aa, synthetic construct
EVQLLESGGGLVQPGGSLRLSCAASGRTFSDYGMGWFRQAPGKEHEFVASINWSNGRTSYADSAKGRFTISRDNAKNTGYLQMNSLRVEDTAVYYCAGTLSGKAYTYWGQGTQVTVSSGGGGSGGGGSGGGGSEVQLLESGGGLVQPGGSLRLSCAASGRTFSDYGMGWFRQAPGKEHEFVASINWSNGRTSYADSAKGRFTISRDNAKNTGYLQMNSLRVEDTAVYYCAGTLSGKAYTYWGQGTQVTVSSGGGGSESKYGPPCPPCPAPEFEGGPSVFLFPPKPKDTLMISRTPEVTCVVVDVSQEDPEVQFNWYVDGVEVHNAKTKPREEQFNSTYRVVSVLTVLHQDWLNGKEYKCKVSNKGLPSSIEKTISKAKGQPREPQVYTLPPSQEEMTKNQVSLTCLVKGFYPSDIAVEWESNGQPENNYKTTPPVLDSDGSFFLYSRLTVDKSRWQEGNVFSCSVMHEALHNHYTQKSLSLSLGK

SEQ ID NO: 4754 - protein, 483 aa, synthetic construct
EVQLLESGGGLVQPGGSLRLSCAASGRTFSDYGMGWFRQAPGKEHEFVASINWSNGRTSYADSAKGRFTISRDNAKNTGYLQMNSLRVEDTAVYYCAGTLSGKAYTYWGQGTQVTVSSGGGGSGGGGSGGGGSEVQLLESGGGLVQPGGSLRLSCAASGRTFSDYGMGWFRQAPGKEHEFVASINWSNGRTSYADSAKGRFTISRDNAKNTGYLQMNSLRVEDTAVYYCAGTLSGKAYTYWGQGTQVTVSSGGGGSDKTHTCPPCPAPEAAGGPSVFLFPPKPKDTLMISRTPEVTCVVVDVSHEDPEVKFNWYVDGVEVHNAKTKPREEQYNSTYRVVSVLTVLHQDWLNGKEYKCKVSNKALAAPIEKTISKAKGQPREPQVYTLPPSREEMTKNQVSLTCLVKGFYPSDIAVEWESNGQPENNYKTTPPVLDSDGSFFLYSKLTVDKSRWQQGNVFSCSVMHEALHNHYTQKSLSLSPGK

SEQ ID NO: 4755 - protein, 485 aa, synthetic construct
DVQLLESGGGLVQPGGSLRLSCAASGRTFSDYGMGWFRQAPGKEHEFVASINWSNGRTSYADSAKGRFTISRDNAKNTGYLQMNSLRVEDTAVYYCAGTLSGKAYTYWGQGTQVTVSSGGGGSGGGGSGGGGSDVQLLESGGGLVQPGGSLRLSCAASGRTFSDYGMGWFRQAPGKEHEFVASINWSNGRTSYADSAKGRFTISRDNAKNTGYLQMNSLRVEDTAVYYCAGTLSGKAYTYWGQGTQVTVSSGGGGSESKYGPPCPPCPAPEFEGGPSVFLFPPKPKDTLMISRTPEVTCVVVDVSQEDPEVQFNWYVDGVEVHNAKTKPREEQFNSTYRVVSVLTVLHQDWLNGKEYKCKVSNKGLPSSIEKTISKAKGQPREPQVYTLPPSQEEMTKNQVSLTCLVKGFYPSDIAVEWESNGQPENNYKTTPPVLDSDGSFFLYSRLTVDKSRWQEGNVFSCSVMHEALHNHYTQKSLSLSLGK

SEQ ID NO: 4756 - protein, 483 aa, synthetic construct
DVQLLESGGGLVQPGGSLRLSCAASGRTFSDYGMGWFRQAPGKEHEFVASINWSNGRTSYADSAKGRFTISRDNAKNTGYLQMNSLRVEDTAVYYCAGTLSGKAYTYWGQGTQVTVSSGGGGSGGGGSGGGGSDVQLLESGGGLVQPGGSLRLSCAASGRTFSDYGMGWFRQAPGKEHEFVASINWSNGRTSYADSAKGRFTISRDNAKNTGYLQMNSLRVEDTAVYYCAGTLSGKAYTYWGQGTQVTVSSGGGGSDKTHTCPPCPAPEAAGGPSVFLFPPKPKDTLMISRTPEVTCVVVDVSHEDPEVKFNWYVDGVEVHNAKTKPREEQYNSTYRVVSVLTVLHQDWLNGKEYKCKVSNKALAAPIEKTISKAKGQPREPQVYTLPPSREEMTKNQVSLTCLVKGFYPSDIAVEWESNGQPENNYKTTPPVLDSDGSFFLYSKLTVDKSRWQQGNVFSCSVMHEALHNHYTQKSLSLSPGK

SEQ ID NO: 4757 - protein, 485 aa, synthetic construct
EVQLLESGGGLVQPGGSLRLSCAASGRTFSDYGMGWFRQAPGKEHEFVASINWSNGRTSYADSAKGRFTISRDNAKNTGYLQMNSLRVEDTAVYYCAGTLSGKAYTYWGQGTQVTVPAGGGGSGGGGSGGGGSEVQLLESGGGLVQPGGSLRLSCAASGRTFSDYGMGWFRQAPGKEHEFVASINWSNGRTSYADSAKGRFTISRDNAKNTGYLQMNSLRVEDTAVYYCAGTLSGKAYTYWGQGTQVTVPAGGGGSESKYGPPCPPCPAPEFEGGPSVFLFPPKPKDTLMISRTPEVTCVVVDVSQEDPEVQFNWYVDGVEVHNAKTKPREEQFNSTYRVVSVLTVLHQDWLNGKEYKCKVSNKGLPSSIEKTISKAKGQPREPQVYTLPPSQEEMTKNQVSLTCLVKGFYPSDIAVEWESNGQPENNYKTTPPVLDSDGSFFLYSRLTVDKSRWQEGNVFSCSVMHEALHNHYTQKSLSLSLGK

SEQ ID NO: 4758 - protein, 483 aa, synthetic construct
EVQLLESGGGLVQPGGSLRLSCAASGRTFSDYGMGWFRQAPGKEHEFVASINWSNGRTSYADSAKGRFTISRDNAKNTGYLQMNSLRVEDTAVYYCAGTLSGKAYTYWGQGTQVTVPAGGGGSGGGGSGGGGSEVQLLESGGGLVQPGGSLRLSCAASGRTFSDYGMGWFRQAPGKEHEFVASINWSNGRTSYADSAKGRFTISRDNAKNTGYLQMNSLRVEDTAVYYCAGTLSGKAYTYWGQGTQVTVPAGGGGSDKTHTCPPCPAPEAAGGPSVFLFPPKPKDTLMISRTPEVTCVVVDVSHEDPEVKFNWYVDGVEVHNAKTKPREEQYNSTYRVVSVLTVLHQDWLNGKEYKCKVSNKALAAPIEKTISKAKGQPREPQVYTLPPSREEMTKNQVSLTCLVKGFYPSDIAVEWESNGQPENNYKTTPPVLDSDGSFFLYSKLTVDKSRWQQGNVFSCSVMHEALHNHYTQKSLSLSPGK

SEQ ID NO: 4759 - protein, 485 aa, synthetic construct
DVQLLESGGGLVQPGGSLRLSCAASGRTFSDYGMGWFRQAPGKEHEFVASINWSNGRTSYADSAKGRFTISRDNAKNTGYLQMNSLRVEDTAVYYCAGTLSGKAYTYWGQGTQVTVPAGGGGSGGGGSGGGGSDVQLLESGGGLVQPGGSLRLSCAASGRTFSDYGMGWFRQAPGKEHEFVASINWSNGRTSYADSAKGRFTISRDNAKNTGYLQMNSLRVEDTAVYYCAGTLSGKAYTYWGQGTQVTVPAGGGGSESKYGPPCPPCPAPEFEGGPSVFLFPPKPKDTLMISRTPEVTCVVVDVSQEDPEVQFNWYVDGVEVHNAKTKPREEQFNSTYRVVSVLTVLHQDWLNGKEYKCKVSNKGLPSSIEKTISKAKGQPREPQVYTLPPSQEEMTKNQVSLTCLVKGFYPSDIAVEWESNGQPENNYKTTPPVLDSDGSFFLYSRLTVDKSRWQEGNVFSCSVMHEALHNHYTQKSLSLSLGK

SEQ ID NO: 4760 - protein, 483 aa, synthetic construct
DVQLLESGGGLVQPGGSLRLSCAASGRTFSDYGMGWFRQAPGKEHEFVASINWSNGRTSYADSAKGRFTISRDNAKNTGYLQMNSLRVEDTAVYYCAGTLSGKAYTYWGQGTQVTVPAGGGGSGGGGSGGGGSDVQLLESGGGLVQPGGSLRLSCAASGRTFSDYGMGWFRQAPGKEHEFVASINWSNGRTSYADSAKGRFTISRDNAKNTGYLQMNSLRVEDTAVYYCAGTLSGKAYTYWGQGTQVTVPAGGGGSDKTHTCPPCPAPEAAGGPSVFLFPPKPKDTLMISRTPEVTCVVVDVSHEDPEVKFNWYVDGVEVHNAKTKPREEQYNSTYRVVSVLTVLHQDWLNGKEYKCKVSNKALAAPIEKTISKAKGQPREPQVYTLPPSREEMTKNQVSLTCLVKGFYPSDIAVEWESNGQPENNYKTTPPVLDSDGSFFLYSKLTVDKSRWQQGNVFSCSVMHEALHNHYTQKSLSLSPGK

SEQ ID NO: 4761 - protein, 485 aa, synthetic construct
DVQLLESGGGLVQPGGSLRLSCAASGRTFSDYGMGWFRQAPGKEHEFVASINWSNGRTSYADSAKGRFTISRDNAKNTGYLQMNSLRVEDTAVYYCAGTLSGKAYTYWGQGTQVTVAGGGGGSGGGGSGGGGSDVQLLESGGGLVQPGGSLRLSCAASGRTFSDYGMGWFRQAPGKEHEFVASINWSNGRTSYADSAKGRFTISRDNAKNTGYLQMNSLRVEDTAVYYCAGTLSGKAYTYWGQGTQVTVAGGGGGSESKYGPPCPPCPAPEFEGGPSVFLFPPKPKDTLMISRTPEVTCVVVDVSQEDPEVQFNWYVDGVEVHNAKTKPREEQFNSTYRVVSVLTVLHQDWLNGKEYKCKVSNKGLPSSIEKTISKAKGQPREPQVYTLPPSQEEMTKNQVSLTCLVKGFYPSDIAVEWESNGQPENNYKTTPPVLDSDGSFFLYSRLTVDKSRWQEGNVFSCSVMHEALHNHYTQKSLSLSLGK

SEQ ID NO: 4762 - protein, 485 aa, synthetic construct
EVQLLESGGGLVQPGGSLRLSCAASGRTFSDYGMGWFRQAPGKEHEFVASINWSNARTSYADSAKGRFTISRDNAKNTGYLQMNSLRVEDTAVYYCAGTLSGKAYTYWGQGTQVTVSSGGGGSGGGGSGGGGSEVQLLESGGGLVQPGGSLRLSCAASGRTFSDYGMGWFRQAPGKEHEFVASINWSNARTSYADSAKGRFTISRDNAKNTGYLQMNSLRVEDTAVYYCAGTLSGKAYTYWGQGTQVTVSSGGGGSESKYGPPCPPCPAPEFEGGPSVFLFPPKPKDTLMISRTPEVTCVVVDVSQEDPEVQFNWYVDGVEVHNAKTKPREEQFNSTYRVVSVLTVLHQDWLNGKEYKCKVSNKGLPSSIEKTISKAKGQPREPQVYTLPPSQEEMTKNQVSLTCLVKGFYPSDIAVEWESNGQPENNYKTTPPVLDSDGSFFLYSRLTVDKSRWQEGNVFSCSVMHEALHNHYTQKSLSLSLGK

SEQ ID NO: 4763 - protein, 483 aa, synthetic construct
EVQLLESGGGLVQPGGSLRLSCAASGRTFSDYGMGWFRQAPGKEHEFVASINWSNARTSYADSAKGRFTISRDNAKNTGYLQMNSLRVEDTAVYYCAGTLSGKAYTYWGQGTQVTVSSGGGGSGGGGSGGGGSEVQLLESGGGLVQPGGSLRLSCAASGRTFSDYGMGWFRQAPGKEHEFVASINWSNARTSYADSAKGRFTISRDNAKNTGYLQMNSLRVEDTAVYYCAGTLSGKAYTYWGQGTQVTVSSGGGGSDKTHTCPPCPAPEAAGGPSVFLFPPKPKDTLMISRTPEVTCVVVDVSHEDPEVKFNWYVDGVEVHNAKTKPREEQYNSTYRVVSVLTVLHQDWLNGKEYKCKVSNKALAAPIEKTISKAKGQPREPQVYTLPPSREEMTKNQVSLTCLVKGFYPSDIAVEWESNGQPENNYKTTPPVLDSDGSFFLYSKLTVDKSRWQQGNVFSCSVMHEALHNHYTQKSLSLSPGK

SEQ ID NO: 4764 - protein, 485 aa, synthetic construct
DVQLLESGGGLVQPGGSLRLSCAASGRTFSDYGMGWFRQAPGKEHEFVASINWSNARTSYADSAKGRFTISRDNAKNTGYLQMNSLRVEDTAVYYCAGTLSGKAYTYWGQGTQVTVSSGGGGSGGGGSGGGGSDVQLLESGGGLVQPGGSLRLSCAASGRTFSDYGMGWFRQAPGKEHEFVASINWSNARTSYADSAKGRFTISRDNAKNTGYLQMNSLRVEDTAVYYCAGTLSGKAYTYWGQGTQVTVSSGGGGSESKYGPPCPPCPAPEFEGGPSVFLFPPKPKDTLMISRTPEVTCVVVDVSQEDPEVQFNWYVDGVEVHNAKTKPREEQFNSTYRVVSVLTVLHQDWLNGKEYKCKVSNKGLPSSIEKTISKAKGQPREPQVYTLPPSQEEMTKNQVSLTCLVKGFYPSDIAVEWESNGQPENNYKTTPPVLDSDGSFFLYSRLTVDKSRWQEGNVFSCSVMHEALHNHYTQKSLSLSLGK

SEQ ID NO: 4765 - protein, 483 aa, synthetic construct
DVQLLESGGGLVQPGGSLRLSCAASGRTFSDYGMGWFRQAPGKEHEFVASINWSNARTSYADSAKGRFTISRDNAKNTGYLQMNSLRVEDTAVYYCAGTLSGKAYTYWGQGTQVTVSSGGGGSGGGGSGGGGSDVQLLESGGGLVQPGGSLRLSCAASGRTFSDYGMGWFRQAPGKEHEFVASINWSNARTSYADSAKGRFTISRDNAKNTGYLQMNSLRVEDTAVYYCAGTLSGKAYTYWGQGTQVTVSSGGGGSDKTHTCPPCPAPEAAGGPSVFLFPPKPKDTLMISRTPEVTCVVVDVSHEDPEVKFNWYVDGVEVHNAKTKPREEQYNSTYRVVSVLTVLHQDWLNGKEYKCKVSNKALAAPIEKTISKAKGQPREPQVYTLPPSREEMTKNQVSLTCLVKGFYPSDIAVEWESNGQPENNYKTTPPVLDSDGSFFLYSKLTVDKSRWQQGNVFSCSVMHEALHNHYTQKSLSLSPGK

SEQ ID NO: 4766 - protein, 485 aa, synthetic construct
EVQLLESGGGLVQPGGSLRLSCAASGRTFSDYGMGWFRQAPGKEHEFVASINWSNARTSYADSAKGRFTISRDNAKNTGYLQMNSLRVEDTAVYYCAGTLSGKAYTYWGQGTQVTVPAGGGGSGGGGSGGGGSEVQLLESGGGLVQPGGSLRLSCAASGRTFSDYGMGWFRQAPGKEHEFVASINWSNARTSYADSAKGRFTISRDNAKNTGYLQMNSLRVEDTAVYYCAGTLSGKAYTYWGQGTQVTVPAGGGGSESKYGPPCPPCPAPEFEGGPSVFLFPPKPKDTLMISRTPEVTCVVVDVSQEDPEVQFNWYVDGVEVHNAKTKPREEQFNSTYRVVSVLTVLHQDWLNGKEYKCKVSNKGLPSSIEKTISKAKGQPREPQVYTLPPSQEEMTKNQVSLTCLVKGFYPSDIAVEWESNGQPENNYKTTPPVLDSDGSFFLYSRLTVDKSRWQEGNVFSCSVMHEALHNHYTQKSLSLSLGK

SEQ ID NO: 4767 - protein, 483 aa, synthetic construct
EVQLLESGGGLVQPGGSLRLSCAASGRTFSDYGMGWFRQAPGKEHEFVASINWSNARTSYADSAKGRFTISRDNAKNTGYLQMNSLRVEDTAVYYCAGTLSGKAYTYWGQGTQVTVPAGGGGSGGGGSGGGGSEVQLLESGGGLVQPGGSLRLSCAASGRTFSDYGMGWFRQAPGKEHEFVASINWSNARTSYADSAKGRFTISRDNAKNTGYLQMNSLRVEDTAVYYCAGTLSGKAYTYWGQGTQVTVPAGGGGSDKTHTCPPCPAPEAAGGPSVFLFPPKPKDTLMISRTPEVTCVVVDVSHEDPEVKFNWYVDGVEVHNAKTKPREEQYNSTYRVVSVLTVLHQDWLNGKEYKCKVSNKALAAPIEKTISKAKGQPREPQVYTLPPSREEMTKNQVSLTCLVKGFYPSDIAVEWESNGQPENNYKTTPPVLDSDGSFFLYSKLTVDKSRWQQGNVFSCSVMHEALHNHYTQKSLSLSPGK

SEQ ID NO: 4768 - protein, 485 aa, synthetic construct
DVQLLESGGGLVQPGGSLRLSCAASGRTFSDYGMGWFRQAPGKEHEFVASINWSNARTSYADSAKGRFTISRDNAKNTGYLQMNSLRVEDTAVYYCAGTLSGKAYTYWGQGTQVTVPAGGGGSGGGGSGGGGSDVQLLESGGGLVQPGGSLRLSCAASGRTFSDYGMGWFRQAPGKEHEFVASINWSNARTSYADSAKGRFTISRDNAKNTGYLQMNSLRVEDTAVYYCAGTLSGKAYTYWGQGTQVTVPAGGGGSESKYGPPCPPCPAPEFEGGPSVFLFPPKPKDTLMISRTPEVTCVVVDVSQEDPEVQFNWYVDGVEVHNAKTKPREEQFNSTYRVVSVLTVLHQDWLNGKEYKCKVSNKGLPSSIEKTISKAKGQPREPQVYTLPPSQEEMTKNQVSLTCLVKGFYPSDIAVEWESNGQPENNYKTTPPVLDSDGSFFLYSRLTVDKSRWQEGNVFSCSVMHEALHNHYTQKSLSLSLGK

SEQ ID NO: 4769 - protein, 483 aa, synthetic construct
DVQLLESGGGLVQPGGSLRLSCAASGRTFSDYGMGWFRQAPGKEHEFVASINWSNARTSYADSAKGRFTISRDNAKNTGYLQMNSLRVEDTAVYYCAGTLSGKAYTYWGQGTQVTVPAGGGGSGGGGSGGGGSDVQLLESGGGLVQPGGSLRLSCAASGRTFSDYGMGWFRQAPGKEHEFVASINWSNARTSYADSAKGRFTISRDNAKNTGYLQMNSLRVEDTAVYYCAGTLSGKAYTYWGQGTQVTVPAGGGGSDKTHTCPPCPAPEAAGGPSVFLFPPKPKDTLMISRTPEVTCVVVDVSHEDPEVKFNWYVDGVEVHNAKTKPREEQYNSTYRVVSVLTVLHQDWLNGKEYKCKVSNKALAAPIEKTISKAKGQPREPQVYTLPPSREEMTKNQVSLTCLVKGFYPSDIAVEWESNGQPENNYKTTPPVLDSDGSFFLYSKLTVDKSRWQQGNVFSCSVMHEALHNHYTQKSLSLSPGK

SEQ ID NO: 4770 - protein, 485 aa, synthetic construct
DVQLLESGGGLVQPGGSLRLSCAASGRTFSDYGMGWFRQAPGKEHEFVASINWSNARTSYADSAKGRFTISRDNAKNTGYLQMNSLRVEDTAVYYCAGTLSGKAYTYWGQGTQVTVAGGGGGSGGGGSGGGGSDVQLLESGGGLVQPGGSLRLSCAASGRTFSDYGMGWFRQAPGKEHEFVASINWSNARTSYADSAKGRFTISRDNAKNTGYLQMNSLRVEDTAVYYCAGTLSGKAYTYWGQGTQVTVAGGGGGSESKYGPPCPPCPAPEFEGGPSVFLFPPKPKDTLMISRTPEVTCVVVDVSQEDPEVQFNWYVDGVEVHNAKTKPREEQFNSTYRVVSVLTVLHQDWLNGKEYKCKVSNKGLPSSIEKTISKAKGQPREPQVYTLPPSQEEMTKNQVSLTCLVKGFYPSDIAVEWESNGQPENNYKTTPPVLDSDGSFFLYSRLTVDKSRWQEGNVFSCSVMHEALHNHYTQKSLSLSLGK

SEQ ID NO: 4771 - protein, 11 aa, synthetic construct
  VARIANT 2: note = A or G
  VARIANT 3: note = T or A
  VARIANT 4: note = P or L
  VARIANT 5: note = S or T
  VARIANT 10: note = T or S
AXXXXGKAYXY
